(19) United States
(12) Patent Application Publication
(10) Pub. No.: US 2023/0287360 A1
(43) Pub. Date: Sep. 14, 2023

(54) KETOREDUCTASE POLYPEPTIDES AND POLYNUCLEOTIDES

(71) Applicant: Codexis, Inc., Redwood City, CA (US)

(72) Inventors: Jack Liang, South San Francisco, CA (US); Nandhitha Subramanian, Cambridge (GB); Charlene Ching, San Jose, CA (US); David William Homan, San Ramon, CA (US); Katie Whalen, Charlottesville, VA (US); Matthew Blake Jones, Portage, MI (US)

(21) Appl. No.: 17/761,126

(22) PCT Filed: Sep. 24, 2020
(86) PCT No.: PCT/US2020/052396

§ 371 Date: Mar. 16, 2022

Related U.S. Application Data
(60) Provisional application No. 62/906,268, filed on Sep. 26, 2019.

(51) Int. Cl. C12N 9/04

(52) U.S. Cl. CPC C12N 9/0006; C12Y 101/01184

(57) ABSTRACT

The present invention provides engineered ketoreductase enzymes having improved properties as compared to a naturally occurring wild-type ketoreductase enzyme, as well as polynucleotides encoding the engineered ketoreductase enzymes, host cells capable of expressing the engineered ketoreductase enzymes, and methods of using the engineered ketoreductase enzymes to synthesize a chiral alcohol. The present invention further provides methods of using the engineered enzymes.

[0001] The present application claims priority to U.S. Prov. Pat. Appln. Ser. No. 62/906,268, filed Sep. 26, 2019, which is incorporated by reference in its entirety, for all purposes.

### REFERENCE TO SEQUENCE LISTING, TABLE OR COMPUTER PROGRAM

[0002] The Sequence Listing concurrently submitted herewith under 37 C.F.R. §1.821 in a computer readable form (CRF) via EFS-Web as file name CX8-195WO2_ST25.txt is herein incorporated by reference. The electronic copy of the Sequence Listing was created on Sep. 23, 2020, with a file size of 664 kilobytes.

### FIELD OF THE INVENTION

[0003] The present invention provides engineered ketoreductase enzymes having improved properties as compared to a naturally occurring wild-type ketoreductase enzyme, as well as polynucleotides encoding the engineered ketoreductase enzymes, host cells capable of expressing the engineered ketoreductase enzymes, and methods of using the engineered ketoreductase enzymes.

### BACKGROUND

[0004] Enzymes belonging to the ketoreductase (KRED) or carbonyl reductase class (EC1.1.1.184) are useful for the synthesis of optically active alcohols from the corresponding prochiral ketone substrate and by stereoselective reduction of corresponding racemic aldehyde substrates. KREDs typically convert ketone and aldehyde substrates to the corresponding alcohol product, but may also catalyze the reverse reaction, oxidation of an alcohol substrate to the corresponding ketone/aldehyde product. The reduction of ketones and aldehydes and the oxidation of alcohols by enzymes such as KRED requires a co-factor, most commonly reduced nicotinamide adenine dinucleotide (NADH) or reduced nicotinamide adenine dinucleotide phosphate (NADPH), and nicotinamide adenine dinucleotide (NAD+) or nicotinamide adenine dinucleotide phosphate (NADP+) for the oxidation reaction. NADH and NADPH serve as electron donors, while NAD+ and NADP+ serve as electron acceptors. It is frequently observed that ketoreductases and alcohol dehydrogenases accept either the phosphorylated or the non-phosphorylated co-factor (in its oxidized and reduced state), but most often not both.

[0005] In order to circumvent many chemical synthetic procedures for the production of key compounds, ketoreductases are increasingly being employed for the enzymatic conversion of different keto and aldehyde substrates to chiral alcohol products. These applications can employ whole cells expressing the ketoreductase for biocatalytic ketone and aldehyde reductions or for biocatalytic alcohol oxidation, or by use of purified enzymes in those instances where presence of multiple ketoreductases in whole cells would adversely affect the stereopurity and yield of the desired product.

[0006] “Bitterness” is a key tasting attribute of beer that is typically derived from the addition of hops (flowers of the plant Humulus lupulus L.). Iso-α-acids are formed during the brewing process by the isomerization of the humulones, which are naturally occurring compounds in the lupulin glands of the hop plant. Specifically, the six major iso-α-acids are responsible for the bitter taste: cis-isohumulone, trans-isohumulone, cis-isocohumulone, trans-isocohumulone, cis-isoadhumulone, and trans-isoadhumulone.

[0007] However, the iso-α-acids are not light stable, and light-induced formation of 3-methyl-2-butene-1-thiol (3-MBT) gives beer a pronounced light-struck or skunky flavor and aroma. This necessitates the packing of beer in brown bottles or cans. Another solution is to create fully light stable beers by reduction of a carbonyl group of the iso-α-acid to produce the corresponding dihydro-(rho)-iso-α-acid. These reduced dihydro-(rho)-iso-α-acids are stable and can be bottled in clear or green bottles.

[0008] However, currently, iso-α-acids can only be converted to dihydro-(rho)-iso-α-acids using toxic, dangerous and non-food grade chemicals (e.g. sodium borohydride). A safe and food-grade conversion of iso-α-acids to dihydro-(rho)-iso-α-acids would, therefore, be of considerable commercial value.

### SUMMARY OF THE INVENTION

[0009] The present invention provides engineered ketoreductase enzymes having improved properties as compared to a naturally occurring wild-type ketoreductase enzyme, as well as polynucleotides encoding the engineered ketoreductase enzymes, host cells capable of expressing the engineered ketoreductase enzymes, and methods of using the engineered ketoreductase enzymes.

[0010] The present invention provides engineered ketoreductase (“KRED”) enzymes with improved enzymatic activity in the conversion of iso-α-acids to the corresponding dihydro-(rho)-iso-α-acids compared to the naturally-occurring, wild-type ketoreductase from Lactobacillus kefir (SEQ ID NO: 2) or when compared with other engineered ketoreductase enzymes, including the engineered ketoreductase polypeptides of SEQ ID NO: 4, 6, 80, 104, 172, 186, 194, 252, 270, 272, 286, 328, and/or 330.

[0011] In some further embodiments, the engineered enzymes have one or more improved properties in addition to improved enzymatic activity. Improvements in enzyme properties include, but are not limited to improved activity across a range of subtrates, improved activity at high substrate concentration, and improved activity at low cofactor concentration.

[0012] The present invention provides engineered ketoreductase variants having at least 85%, 90%, 91%, 92%, 93%, 94%, 95%, 96%, 97%, 98%, 99% or more sequence identity to SEQ ID NO: 4, 6, 80, 104, 172, 186, 194, 252, 270, 272, 286, 328, and/or 330.

[0013] The present invention also provides engineered ketoreductase variants having at least 85%, 90%, 91%, 92%, 93%, 94%, 95%, 96%, 97%, 98%, 99% or more sequence identity to SEQ ID NO: 4, and at least one substitution or substitution set at one or more positions selected from positions 12, 21, 87, 93, 97, 110, 145, 148, 152, 153, 194, 196, 197, 200, 206, 212, and 226, wherein the positions are numbered with reference to SEQ ID NO: 4. In some additional embodiments, the engineered ketoreductase variants comprise at least one substitution or substitution set selected from 12I, 21R, 87L, 93D, 93M, 93T, 93V, 97G, 110I, 145C, 145G, 145M, 145S, 148I, 152G, 152S, 153C, 153R, 153V, 194H, 194N, 194R, 196H, 196K, 196R, 197G, 197R, 200L, 200Q, 200R, 206V, 212S, and 226L, wherein the positions are numbered with reference to SEQ ID NO: 4. In some further embodiments, the engineered ketoreductase variants comprise at least one substitution or substitution set selected from V12I, L21R, V87L, I93D, I93M, I93T, I93V, K97G, L110I, L145C, L145G, L145M, L145S, V148I, T152G, T152S, L153C, L153R, L153V, P194H, P194N, P194R, L196H, L196K, L196R, D197G, D197R, E200L, E200Q, E200R, M206V, T212S, and I226L, wherein the positions are numbered with reference to SEQ ID NO: 4.

[0014] The present invention also provides engineered ketoreductase variants having at least 85%, 90%, 91%, 92%, 93%, 94%, 95%, 96%, 97%, 98%, 99% or more sequence identity to SEQ ID NO: 6, and at least one substitution or substitution set at one or more positions selected from positions 12/110/145/152, 12/145, 87/110/145, 87/110/145/194, 87/145/194, 110, 110/145/152/197, 110/145/194, 145, 145/152, 145/197/226, and 152, wherein the positions are numbered with reference to SEQ ID NO: 6. In some embodiments, the engineered ketoreductase variants comprise at least one substitution or substitution set selected from 12I/110I/145M/152G, 12I/145M, 87L/110I/145M, 87L/110I/145M/194H, 87L/110I/145M/194N, 87L/145M/194H, 110I, 110I/145M/152G/197G, 110I/145M/194H, 145M, 145M/152G, 145M/197G/226L, and 152S, wherein the positions are numbered with reference to SEQ ID NO: 6. In some additional embodiments, the engineered ketoreductase variants comprise at least one substitution or substitution set selected from V12I/L110I/L145M/T152G, V12I/L145M, V87L/L110I/L145M, V87L/L110I/L145M/P194H, V87L/L110I/L145M/P194N, V87L/L145M/P194H, L110I, L110I/L145M/T152G/D197G, L110I/L145M/P194H, L145M, L145M/T152G, L145M/D197G/I226L, and T152S, wherein the positions are numbered with reference to SEQ ID NO: 6.

[0015] The present invention also provides engineered ketoreductase variants having at least 85%, 90%, 91%, 92%, 93%, 94%, 95%, 96%, 97%, 98%, 99% or more sequence identity to SEQ ID NO: 80, and at least one substitution or substitution set at one or more positions selected from positions 17, 21, 46, 56, 72, 79, 95, 101, 110, 152, 162, 190, 198, 210, 211, and 227, wherein the positions are numbered with reference to SEQ ID NO: 80. In some additional embodiments, the engineered ketoreductase variants comprise at least one substitution or substitution set selected from 17Q, 17S, 21A, 46V, 56C, 72A, 79L, 95I, 101C, 101L, 101T, 110V, 152K, 152L, 162G, 190A, 198A, 198Q, 210F, 210W, 211R, and 227V, wherein the positions are numbered with reference to SEQ ID NO: 80. In some further embodiments, the engineered ketoreductase variants comprise at least one substitution or substitution set selected from L17Q, L17S, L21A, K46V, V56C, K72A, E79L, V95I, D101C, D101L, D101T, I110V, T152K, T152L, A162G, P190A, D198A, D198Q, T210F, T210W, L211R, and C227V, wherein the positions are numbered with reference to SEQ ID NO: 80.

[0016] The present invention also provides engineered ketoreductase variants having at least 85%, 90%, 91%, 92%, 93%, 94%, 95%, 96%, 97%, 98%, 99% or more sequence identity to SEQ ID NO: 80, and at least one substitution or substitution set at one or more positions selected from positions 17, 79, 157, 159, 190/191/194, 190/194, 191/194, 194, 198, and 211, wherein the positions are numbered with reference to SEQ ID NO: 80. In some additional embodiments, the engineered ketoreductase variants comprise at least one substitution or substitution set selected from 17M, 17Q, 17S, 79L, 157C, 159T, 190A/191T/194E, 190A/194E, 191T/194E, 194E, 198A, 198Q, and 211R, wherein the positions are numbered with reference to SEQ ID NO: 80. In some further embodiments, the engineered ketoreductase variants comprise at least one substitution or substitution set selected from L17M, L17Q, L17S, E79L, N157C, S159T, P190A/I191T/P194E, P190A/P194E, I191T/P194E, P194E, D198A, D198Q, and L211R, wherein the positions are numbered with reference to SEQ ID NO: 80.

[0017] The present invention also provides engineered ketoreductase variants having at least 85%, 90%, 91%, 92%, 93%, 94%, 95%, 96%, 97%, 98%, 99% or more sequence identity to SEQ ID NO: 104, and at least one substitution or substitution set at one or more positions selected from positions 17/46/190, 17/46/198/211, 17/96/194/198, 17/190/198, 46/190/194/198, and 46/194/198, wherein the positions are numbered with reference to SEQ ID NO: 104. In some additional embodiments, the engineered ketoreductase variants comprise at least one substitution or substitution set selected from 17M/46V/190A, 17M/46V/198A/211R, 17M/96V/194E/198Q, 17M/190A/198A, 17M/190A/198Q, 46V/190A/194E/198Q, and 46V/194E/198Q, wherein the positions are numbered with reference to SEQ ID NO: 104. In some further embodiments, the engineered ketoreductase variants comprise at least one substitution or substitution set selected from Q17M/K46V/P190A, Q17M/K46V/D198A/L211R, Q17M/I96V/P194E/D198Q, Q17M/P190A/D198A, Q17M/P190A/D198Q, K46V/P190A/P194E/D198Q, and K46V/P194E/D198Q, wherein the positions are numbered with reference to SEQ ID NO: 104.

[0018] The present invention also provides engineered ketoreductase variants having at least 85%, 90%, 91%, 92%, 93%, 94%, 95%, 96%, 97%, 98%, 99% or more sequence identity to SEQ ID NO: 172, and at least one substitution or substitution set at one or more positions selected from positions 45, 101, 179, 194, 204, 226, and 231, wherein the positions are numbered with reference to SEQ ID NO: 172. In some additional embodiments, the engineered ketoreductase variants comprise at least one substitution or substitution set selected from 45L, 101R, 101Y, 179M, 194E, 204Q, 226V, and 231G, wherein the positions are numbered with reference to SEQ ID NO: 172. In some further embodiments, the engineered ketoreductase variants comprise at least one substitution or substitution set selected from E45L, D101R, D101Y, Y179M, P194E, E204Q, I226V, and A231G, wherein the positions are numbered with reference to SEQ ID NO: 172.

[0019] The present invention also provides engineered ketoreductase variants having at least 85%, 90%, 91%, 92%, 93%, 94%, 95%, 96%, 97%, 98%, 99% or more sequence identity to SEQ ID NO: 186, and at least one substitution or substitution set at one or more positions selected from positions 95/96/97/150/153/205, 95/96/150/153/205/206/211/249, 95/97/143/145/150/153/202/205, 95/97/143/145/150/153/249, 95/97/150/153, 95/97/150/153/202/205/206, 95/150/153/205/206/211, 95/150/153/205/211, 95/150/153/206/249, 96/150/153, 96/150/153/206, 97/150/153, 97/150/153/205, 97/150/153/205/211, 97/150/153/206, 143/144/145/150/153/202/205/249, 143/145/150/153, 144/145/150/153/205/206, 144/150/153, 144/150/153/202/205/206, 145/150/153/206/249, 145/153/211, 150/153/202/206/249, 150/153/205/211, 150/153/206/211, 150/153/211, and 150/153/249, wherein the positions are numbered with reference to SEQ ID NO: 186. In some additional embodiments, the engineered ketoreductase variants comprise at least one substitution or substitution set selected from 95A/96A/97A/150A/153A/205A, 95A/96A/150A/153A/205A/206A/211A/249A, 95A/97A/143A/145A/150A/153A/202A/205A, 95A/97A/143A/145A/150A/153A/249A, 95A/97A/150A/153A, 95A/97A/150A/153A/202A/205A/206A, 95A/150A/153A/205A/206A/211A, 95A/150A/153A/205A/211A, 95A/150A/153A/206A/249A, 96A/150A/153A, 96A/150A/153A/206A, 97A/150A/153A, 97A/150A/153A/205A, 97A/150A/153A/205A/211A, 97A/150A/153A/206A, 143A/144A/145A/150A/153A/202A/205A/249A, 143A/145A/150A/153A, 144A/145A/150A/153A/205A/206A, 144A/150A/153A, 144A/150A/153A/202A/205A/206A, 145A/150A/153A/206A/249A, 145A/153A/211A, 150A/153A/202A/206A/249A, 150A/153A/205A/211A, 150A/153A/206A/211A, 150A/153A/211A, and 150A/153A/249A, wherein the positions are numbered with reference to SEQ ID NO: 186. In some further embodiments, the engineered ketoreductase variants comprise at least one substitution or substitution set selected from V95A/I96A/K97A/D150A/L153A/M205A, V95A/I96A/D150A/L153A/M205A/M206A/L211A/W249A, V95A/K97A/S143A/M145A/D150A/L153A/W202A/M205A, V95A/K97A/S143A/M145A/D150A/L153A/W249A, V95A/K97A/D150A/L153A, V95A/K97A/D150A/L153A/W202A/M205A/M206A, V95A/D150A/L153A/M205A/M206A/L211A, V95A/D150A/L153A/M205A/L211A, V95A/D150A/L153A/M206A/W249A, I96A/D150A/L153A, I96A/D150A/L153A/M206A, K97A/D150A/L153A, K97A/D150A/L153A/M205A, K97A/D150A/L153A/M205A/L211A, K97A/D150A/L153A/M206A, S143A/I144A/M145A/D150A/L153A/W202A/M205A/W249A, S143A/M145A/D150A/L153A, I144A/M145A/D150A/L153A/M205A/M206A, I144A/D150A/L153A, I144A/D150A/L153A/W202A/M205A/M206A, M145A/D150A/L153A/M206A/W249A, M145A/L153A/L211A, D150A/L153A/W202A/M206A/W249A, D150A/L153A/M205A/L211A, D150A/L153A/M206A/L211A, D150A/L153A/L211A, and D150A/L153A/W249A, wherein the positions are numbered with reference to SEQ ID NO: 186.

[0020] The present invention also provides engineered ketoreductase variants having at least 85%, 90%, 91%, 92%, 93%, 94%, 95%, 96%, 97%, 98%, 99% or more sequence identity to SEQ ID NO: 186, and at least one substitution or substitution set at one or more positions selected from positions 7/147, 103/147, 110, 110/179/194, 147, and 249, wherein the positions are numbered with reference to SEQ ID NO: 186. In some additional embodiments, the engineered ketoreductase variants comprise at least one substitution or substitution set selected from 7Q/147I, 103R/147I, 110V, 110V/179M/194E, 147I, and 249Y, wherein the positions are numbered with reference to SEQ ID NO: 186. In some further embodiments, the engineered ketoreductase variants comprise at least one substitution or substitution set selected from H7Q/L147I, T103R/L147I, I110V, I110V/Y179M/P194E, L147I, and W249Y, wherein the positions are numbered with reference to SEQ ID NO: 186.

[0021] The present invention also provides engineered ketoreductase variants having at least 85%, 90%, 91%, 92%, 93%, 94%, 95%, 96%, 97%, 98%, 99% or more sequence identity to SEQ ID NO: 194, and at least one substitution or substitution set at one or more positions selected from positions 7/12/54/110/150/153/194/205/211/249, 12/54/72/110/150/152/153/194/205/211/249, 12/72/101/103/110/152/249, 12/72/110/147/152/204, 45/54/72/110/152/194/204, 72/110/147/150/152/153/194/205/211/249, and 110/150/153/179/194/205/211/249, wherein the positions are numbered with reference to SEQ ID NO: 194. In some additional embodiments, the engineered ketoreductase variants comprise at least one substitution or substitution set selected from 7Q/12I/54S/110V/150D/153L/194E/205M/211L/249Y, 12I/54S/72T/110V/150D/152M/153L/194E/205M/211L/249Y, 12I/72S/101Y/103Q/110V/152M/249Y, 12I/72S/110V/147I/152M/204Q, 45L/54S/72S/110V/152M/194E/204Q, 72S/110V/147M/150D/152M/153L/194E/205M/211L/249Y, and 110V/150D/153L/179M/194E/205M/211L/249Y, wherein the positions are numbered with reference to SEQ ID NO: 194. In some further embodiments, the engineered ketoreductase variants comprise at least one substitution or substitution set selected from H7Q/V12I/T54S/I110V/A150D/A153L/P194E/A205M/A211L/W249Y, V12I/T54S/K72T/I110V/A150D/T152M/A153L/P194E/A205M/A211L/W249Y, V12I/K72S/R101Y/T103Q/I110V/T152M/W249Y, V12I/K72S/I110V/L147I/T152M/E204Q, E45L/T54S/K72S/I110V/T152M/P194E/E204Q, K72S/I110V/L147M/A150D/T152M/A153L/P194E/A205M/A211L/W249Y, and I110V/A150D/A153L/Y179M/P194E/A205M/A211L/W249Y, wherein the positions are numbered with reference to SEQ ID NO: 194.

[0022] The present invention also provides engineered ketoreductase variants having at least 85%, 90%, 91%, 92%, 93%, 94%, 95%, 96%, 97%, 98%, 99% or more sequence identity to SEQ ID NO: 252, and at least one substitution or substitution set at one or more positions selected from positions 7/12/54/179/249, 7/152, 12/54/72/152/179/249, 40, 54/72, 72/147/152/179/249, and 249, wherein the positions are numbered with reference to SEQ ID NO: 252. In some additional embodiments, the engineered ketoreductase variants comprise at least one substitution or substitution set selected from 7Q/12I/54S/179Y/249Y, 7Q/152M, 12I/54S/72T/152M/179Y/249Y, 40E, 54S/72S, 72S/147M/152M/179Y/249Y, and 249Y, wherein the positions are numbered with reference to SEQ ID NO: 252. In some further embodiments, the engineered ketoreductase variants comprise at least one substitution or substitution set selected from H7Q/V12I/T54S/M179Y/W249Y, H7Q/T152M, V12I/T54S/K72T/T152M/M179Y/W249Y, H40E, T54S/K72S, K72S/L147M/T152M/M179Y/W249Y, and W249Y, wherein the positions are numbered with reference to SEQ ID NO: 252.

[0023] The present invention also provides engineered ketoreductase variants having at least 85%, 90%, 91%, 92%, 93%, 94%, 95%, 96%, 97%, 98%, 99% or more sequence identity to SEQ ID NO: 270, and at least one substitution or substitution set at one or more positions selected from positions 92/93, 150/152, 150/152/153, and 194/195, wherein the positions are numbered with reference to SEQ ID NO: 270. In some additional embodiments, the engineered ketoreductase variants comprise at least one substitution or substitution set selected from 92A/93E, 150D/152A/153L, 150Y/152A, 150Y/152S, and 194S/195A, wherein the positions are numbered with reference to SEQ ID NO: 270. In some further embodiments, the engineered ketoreductase variants comprise at least one substitution or substitution set selected from G92A/I93E, A150D/M152A/A153L, A150Y/M152A, A150Y/M152S, and E194S/R195A, wherein the positions are numbered with reference to SEQ ID NO: 270.

[0024] The present invention also provides engineered ketoreductase variants having at least 85%, 90%, 91%, 92%, 93%, 94%, 95%, 96%, 97%, 98%, 99% or more sequence identity to SEQ ID NO: 272, and at least one substitution or substitution set at one or more positions selected from positions 92/93/95, 93, 93/95, 93/95/109, 93/95/109/114, 93/95/114, 93/109/114, and 114, wherein the positions are numbered with reference to SEQ ID NO: 272. In some additional embodiments, the engineered ketoreductase variants comprise at least one substitution or substitution set selected from 92A/93D/95R, 93A/95K/109R, 93A/95R/109D/114T, 93D/95R, 93E/109R/114A, 93M, 93R/95A/114T, and 114A, wherein the positions are numbered with reference to SEQ ID NO: 272. In some further embodiments, the engineered ketoreductase variants comprise at least one substitution or substitution set selected from G92A/I93D/V95R, I93A/V95K/K109R, I93A/V95R/K109D/N114T, I93D/V95R, I93E/K109R/N114A, I93M, I93R/V95A/N114T, and N114A, wherein the positions are numbered with reference to SEQ ID NO: 272.

[0025] The present invention also provides engineered ketoreductase variants having at least 85%, 90%, 91%, 92%, 93%, 94%, 95%, 96%, 97%, 98%, 99% or more sequence identity to SEQ ID NO: 286, and at least one substitution or substitution set at one or more positions selected from positions 12/45/72/109/249, 12/45/93/249, 12/45/249, 12/109/249, 45/72/249, 45/109/249, 45/249, 96, and 145/150, wherein the positions are numbered with reference to SEQ ID NO: 286. In some additional embodiments, the engineered ketoreductase variants comprise at least one substitution or substitution set selected from 12I/45E/72T/109D/249Y, 12I/45E/93A/249Y, 12I/45E/249Y, 12I/109D/249Y, 45E/72T/249Y, 45E/109D/249Y, 45E/249Y, 96A, and 145A/150A, wherein the positions are numbered with reference to SEQ ID NO: 286. In some further embodiments, the engineered ketoreductase variants comprise at least one substitution or substitution set selected from V12I/L45E/S72T/K109D/W249Y, V12I/L45E/I93A/W249Y, V12I/L45E/W249Y, V12I/K109D/W249Y, L45E/S72T/W249Y, L45E/K109D/W249Y, L45E/W249Y, I96A, and M145A/Y150A, wherein the positions are numbered with reference to SEQ ID NO: 286.

[0026] The present invention also provides engineered ketoreductase variants having at least 85%, 90%, 91%, 92%, 93%, 94%, 95%, 96%, 97%, 98%, 99% or more sequence identity to SEQ ID NO: 328, and at least one substitution or substitution set at one or more positions selected from positions 150, 150/151, 150/195, and 195, wherein the positions are numbered with reference to SEQ ID NO: 328. In some additional embodiments, the engineered ketoreductase variants comprise at least one substitution or substitution set selected from 150A, 150A/151A, 150A/195S, 195A, and 195S, wherein the positions are numbered with reference to SEQ ID NO: 328. In some further embodiments, the engineered ketoreductase variants comprise at least one substitution or substitution set selected from Y150A, Y150A/P151A, Y150A/R195S, R195A, and R195S, wherein the positions are numbered with reference to SEQ ID NO: 328.

[0027] The present invention also provides engineered ketoreductase variants having at least 85%, 90%, 91%, 92%, 93%, 94%, 95%, 96%, 97%, 98%, 99% or more sequence identity to SEQ ID NO: 330, and at least one substitution or substitution set at one or more positions selected from positions 12/72/109/195, 17/73/200, 17/115, 68/72/101/152/205, 68/72/124, 68/72/124/152, 68/101/124/152/205, 68/124/205, 72/109/152/195, 72/109/195, 72/152, 72/152/195, 72/195, 73, 73/147, 79, 93, 93/95/145/195, 93/109/114/145/195, 93/195, 95/195, 96/108/147/200, 96/194/200, 101/205, 145/195, 147, 147/200, 192, 194, 194/200, 195, 198, and 200, wherein the positions are numbered with reference to SEQ ID NO: 330. In some additional embodiments, the engineered ketoreductase variants comprise at least one substitution or substitution set selected from 12V/72S/109K/195R, 17A/73V/200P, 17A/115Q, 68E/72D/101K/152Q/205L, 68R/72D/101Q/152Q/205L, 68R/72R/124E, 68R/72R/124E/152Q, 68R/101Q/124E/152Q/205L, 68R/124E/205L, 72D/152Q, 72 K/152M/195R, 72 K/195R, 72S/109K/152M/195R, 72S/109K/195R, 73V, 73V/147I, 79A, 93A, 93A/95R/145A/195R, 93A/109K/114T/145A/195R, 93A/195R, 95R/195R, 96P/108S/147I/200P, 96P/194N/200P, 101M/205L, 145A/195A, 147I, 147I/200P, 192R, 194N, 194N/200P, 195R, 198G, 198R, and 200P, wherein the positions are numbered with reference to SEQ ID NO: 330. In some further embodiments, the engineered ketoreductase variants comprise at least one substitution or substitution set selected I12V/T72S/D109K/S195R, M17A/L73V/E200P, M17A/L115Q, A68E/T72D/R101K/A152Q/A205L, A68R/T72D/R101Q/A152Q/A205L, A68R/T72R/L124E, A68R/T72R/L124E/A152Q, A68R/R101Q/L124E/A152Q/A205L, A68R/L124E/A205L, T72D/A152Q, T72K/A152M/S195R, T72K/S195R, T72S/D109K/A152M/S195R, T72S/D109K/S195R, L73V, L73V/L147I, E79A, I93A, I93A/V95R/M145A/S195R, I93A/D109K/N114T/M145A/S195R, I93A/S195R, V95R/S195R, I96P/R108S/L147I/E200P, I96P/E194N/E200P, R101M/A205L, M145A/S195A, L147I, L147I/E200P, K192R, E194N, E194N/E200P, S195R, Q198G, Q198R, and E200P, wherein the positions are numbered with reference to SEQ ID NO: 330.

[0028] The present invention also provides engineered ketoreductase variants comprising polypeptide sequences comprising sequences having at least 90% sequence identity to SEQ ID NO: 4, 6, 80, 104, 172, 186, 194, 252, 270, 272, 286, 328, and/or 330. In some embodiments, the engineered ketoreductase variants comprise polypeptide sequences comprising sequences having at least 95% sequence identity to SEQ ID NO: 4, 6, 80, 104, 172, 186, 194, 252, 270, 272, 286, 328, and/or 330. In some further embodiments, the engineered ketoreductase variants comprise polypeptide sequences set forth in SEQ ID NO: 4, 6, 80, 104, 172, 186, 194, 252, 270, 272, 286, 328, and/or 330. In some additional embodiments, the engineered ketoreductase variants comprise polypeptide sequences encoding variants provided in Table 5-1, 6-1, 7-1, 8-1, 17-2, 18-1, 19-1, 19-2, 20-1, 20-2, 21-1, 22-1 and/or 24-1. In some further embodiments, the engineered ketoreductase variants comprise polypeptide sequences selected from the even-numbered sequences set forth in SEQ ID NOS: 6 to 412.

[0029] The present invention also provides engineered polynucleotide sequences encoding the engineered ketoreductase variants provided herein. In some embodiments, the engineered polynucleotide sequence comprises a polynucleotide sequence that is at least 85%, 90%, 91%, 92%, 93%, 94%, 95%, 96%, 97%, 98%, 99% or more identical to a sequence selected from the odd-numbered sequences set forth in SEQ ID NOS: 5 to 411. The present invention also provides vectors comprising the engineered polynucleotide sequences encoding the engineered ketoreductase variants provided herein. In some embodiments, the vectors further comprise at least one control sequence. In some embodiments, the vectors comprise SEQ ID NO: 413 and/or 414.

[0030] The present invention also provides host cells comprising the vectors comprising polynucleotides encoding the engineered ketoreductase variants provided herein.

[0031] The present invention also provides methods of producing the engineered ketoreductase variants provided herein, comprising culturing the host cells provided herein under conditions that the engineered ketoreductase variant is produced by the host cell. In some embodiments, the methods further comprise the step of recovering the engineered ketoreductase variant produced by the host cell. In some further embodiments, the methods of producing the engineered ketoreductase variants comprise culturing a host cell comprising the vector of SEQ ID NO: 413 and/or 414.

[0032] The present invention also provides immobilized engineered ketoreductase variants.

[0033] The present invention further provides compositions comprising at least one engineered ketoreductase variant provided herein. In some embodiments, the compositions comprise at least one immobilized engineered ketoreductase variant provided herein.

### BRIEF DESCRIPTION OF THE FIGURES

[0034] FIG. 1 provides a typical HPLC reaction profile comparing the KRED activity of the polypeptides of SEQ ID NO: 6 and SEQ ID NO: 80 at high substrate concentration.

[0035] FIG. 2 provides the results of the experiments described in Example 11, KRED activity (% conversion) of selected variants at high substrate and low NADP concentration.

[0036] FIG. 3 provides a typical HPLC reaction profile depicting the Rho species produced by the polypeptide of SEQ ID NO:194.

[0037] FIG. 4 provides a typical HPLC reaction profile comparing the KRED activity of the polypeptides of SEQ ID NO: 328 and SEQ ID NO: 330 at high substrate and low NADP concentration. For FIG. 4, Solid Lines = 4 g/L enzyme; Dashed lines = 1 g/L enzyme; Diamond = SEQ ID NO: 328; Open Squares = SEQ ID NO: 330.

[0038] FIG. 5 provides a typical HPLC reaction profile comparing the KRED activity of the polypeptides of SEQ ID NO:270, SEQ ID NO: 328, SEQ ID NO: 330, SEQ ID NO: 348, SEQ ID NO: 346, and SEQ ID NO: 356 at high substrate and low NADP concentration. For FIG. 5, Open Triangle = SEQ ID NO:270; Filled Triangle = SEQ ID NO: 328; Open Circle= SEQ ID NO: 348; Filled Circle = SEQ ID NO: 356; Open Square = SEQ ID NO: 330; Filled Square = SEQ ID NO: 346.

### DESCRIPTION OF THE INVENTION

[0039] The present invention provides engineered ketoreductase enzymes having improved properties as compared to a naturally occurring wild-type ketoreductase, as well as polynucleotides encoding the engineered ketoreductase enzymes, host cells capable of expressing the engineered ketoreductase enzymes, and methods of using the engineered ketoreductase enzymes.

### Definitions

[0040] In reference to the present invention, the technical and scientific terms used in the descriptions herein will have the meanings commonly understood by one of ordinary skill in the art, unless specifically defined otherwise. Accordingly, the following terms are intended to have the following meanings. All patents and publications, including all sequences disclosed within such patents and publications, referred to herein are expressly incorporated by reference. Unless otherwise indicated, the practice of the present invention involves conventional techniques commonly used in molecular biology, fermentation, microbiology, and related fields, which are known to those of skill in the art. Unless defined otherwise herein, all technical and scientific terms used herein have the same meaning as commonly understood by one of ordinary skill in the art to which this invention belongs. Although any methods and materials similar or equivalent to those described herein can be used in the practice or testing of the present invention, the preferred methods and materials are described. Indeed, it is intended that the present invention not be limited to the particular methodology, protocols, and reagents described herein, as these may vary, depending upon the context in which they are used. The headings provided herein are not limitations of the various aspects or embodiments of the present invention.

[0041] Nonetheless, in order to facilitate understanding of the present invention, a number of terms are defined below. Numeric ranges are inclusive of the numbers defining the range. Thus, every numerical range disclosed herein is intended to encompass every narrower numerical range that falls within such broader numerical range, as if such narrower numerical ranges were all expressly written herein. It is also intended that every maximum (or minimum) numerical limitation disclosed herein includes every lower (or higher) numerical limitation, as if such lower (or higher) numerical limitations were expressly written herein.

[0042] As used herein, the term “comprising” and its cognates are used in their inclusive sense (i.e., equivalent to the term “including” and its corresponding cognates).

[0043] As used herein and in the appended claims, the singular “a”, “an” and “the” include the plural reference unless the context clearly dictates otherwise. Thus, for example, reference to a “host cell” includes a plurality of such host cells.

[0044] Unless otherwise indicated, nucleic acids are written left to right in 5′ to 3′ orientation and amino acid sequences are written left to right in amino to carboxy orientation, respectively.

[0045] The headings provided herein are not limitations of the various aspects or embodiments of the invention that can be had by reference to the specification as a whole. Accordingly, the terms defined below are more fully defined by reference to the specification as a whole.

[0046] “Ketoreductase” and “KRED” are used interchangeably herein to refer to a polypeptide having an enzymatic capability of reducing a carbonyl group to its corresponding alcohol. More specifically, the ketoreductase polypeptides of the invention are capable of reducing a mixture of iso-α-acids to the corresponding dihydro-(rho)-iso-α-acids, as shown in Scheme 1. The ketoreductase enzymes of the current invention are derived from the naturally occurring KRED of L. kefir (SEQ ID NO: 2). However, the terms KRED and ketoreductase are not thus limited, and may refer to naturally occurring enzymes or enzymes derived from various species of bacteria, plants, algae, and/or animal species. The enzymes may be synthetic, man-made, or produced by various methods known to those skilled in the art.

[0047] “Iso-α-acids” or “iso” are used interchangeably herein to refer to the isomers, epimers, diastereomers, tautomers and enantiomers of isohumulone, a compound derived from hops, the flowers of the hop plant, Humulus lupulus L. The “iso-α-acids” or “iso” include cis-isohumulone, trans-isohumulone, cis-isocohumulone, trans-isocohumulone, cis-isoadhumulone, and trans-isoadhumulone, but are not limited thereto. The “iso-α-acids” or “iso” also include any naturally occurring or synthetic isomers, epimers, diastereomers, tautomers enantiomers or other derivates or similar compounds that have similar chemical properties, specifically conferring a bitter taste or bitterness to beer or other alcoholic or similar beverages. This includes any isomers, epimers, diastereomers, enantiomers or tautomers of the isohumulone tetronic acid core.

[0048] “Dihydro-(rho)-iso-α-acids” or “rho” are used interchangeably herein to refer to the compounds created by the reduction of a carbonyl group of an “iso-α-acid” or “iso,” as defined herein. “Dihydro-(rho)-iso-α-acids” or “rho” can be produced from “iso-α-acids” or “iso” through conversion by one or more KRED polypeptides, as described herein.

[0049] As used herein, the terms “protein,” “polypeptide,” and “peptide” are used interchangeably herein to denote a polymer of at least two amino acids covalently linked by an amide bond, regardless of length or post-translational modification (e.g., glycosylation, phosphorylation, lipidation, myristilation, ubiquitination, etc.). Included within this definition are D- and L-amino acids, and mixtures of D- and L-amino acids.

[0050] As used herein, “polynucleotide” and “nucleic acid” refer to two or more nucleosides that are covalently linked together. The polynucleotide may be wholly comprised of ribonucleosides (i.e., an RNA), wholly comprised of 2′ deoxyribonucleotides (i.e., a DNA) or mixtures of ribo- and 2′ deoxyribonucleosides. While the nucleosides will typically be linked together via standard phosphodiester linkages, the polynucleotides may include one or more non-standard linkages. The polynucleotide may be single-stranded or double-stranded, or may include both single-stranded regions and double-stranded regions. Moreover, while a polynucleotide will typically be composed of the naturally occurring encoding nucleobases (i.e., adenine, guanine, uracil, thymine, and cytosine), it may include one or more modified and/or synthetic nucleobases (e.g., inosine, xanthine, hypoxanthine, etc.). Preferably, such modified or synthetic nucleobases will be encoding nucleobases.

[0051] As used herein, “coding sequence” refers to that portion of a nucleic acid (e.g., a gene) that encodes an amino acid sequence of a protein.

[0052] As used herein, “naturally occurring” or “wild-type” refers to the form found in nature. For example, a naturally occurring or wild-type polypeptide or polynucleotide sequence is a sequence present in an organism that can be isolated from a source in nature and which has not been intentionally modified by human manipulation.

[0053] As used herein, “non-naturally occurring” or “engineered” or “recombinant” when used in the present invention with reference to (e.g., a cell, nucleic acid, or polypeptide), refers to a material, or a material corresponding to the natural or native form of the material, that has been modified in a manner that would not otherwise exist in nature, or is identical thereto but produced or derived from synthetic materials and/or by manipulation using recombinant techniques. Non-limiting examples include, among others, recombinant cells expressing genes that are not found within the native (non-recombinant) form of the cell or express native genes that are otherwise expressed at a different level.

[0054] As used herein, “percentage of sequence identity,” “percent identity,” and “percent identical” refer to comparisons between polynucleotide sequences or polypeptide sequences, and are determined by comparing two optimally aligned sequences over a comparison window, wherein the portion of the polynucleotide or polypeptide sequence in the comparison window may comprise additions or deletions (i.e., gaps) as compared to the reference sequence for optimal alignment of the two sequences. The percentage is calculated by determining the number of positions at which either the identical nucleic acid base or amino acid residue occurs in both sequences or a nucleic acid base or amino acid residue is aligned with a gap to yield the number of matched positions, dividing the number of matched positions by the total number of positions in the window of comparison and multiplying the result by 100 to yield the percentage of sequence identity. Determination of optimal alignment and percent sequence identity is performed using the BLAST and BLAST 2.0 algorithms (See e.g., Altschul et al., J. Mol. Biol. 215: 403-410 [1990]; and Altschul et al., Nucleic Acids Res. 3389-3402 [1977]). Software for performing BLAST analyses is publicly available through the National Center for Biotechnology Information website.

[0055] Briefly, the BLAST analyses involve first identifying high scoring sequence pairs (HSPs) by identifying short words of length W in the query sequence, which either match or satisfy some positive-valued threshold score T when aligned with a word of the same length in a database sequence. T is referred to as, the neighborhood word score threshold (Altschul et al, supra). These initial neighborhood word hits act as seeds for initiating searches to find longer HSPs containing them. The word hits are then extended in both directions along each sequence for as far as the cumulative alignment score can be increased. Cumulative scores are calculated using, for nucleotide sequences, the parameters M (reward score for a pair of matching residues; always >0) and N (penalty score for mismatching residues; always <0). For amino acid sequences, a scoring matrix is used to calculate the cumulative score. Extension of the word hits in each direction are halted when: the cumulative alignment score falls off by the quantity X from its maximum achieved value; the cumulative score goes to zero or below, due to the accumulation of one or more negative-scoring residue alignments; or the end of either sequence is reached. The BLAST algorithm parameters W, T, and X determine the sensitivity and speed of the alignment. The BLASTN program (for nucleotide sequences) uses as defaults a wordlength (W) of 11, an expectation (E) of 10, M=5, N=-4, and a comparison of both strands. For amino acid sequences, the BLASTP program uses as defaults a wordlength (W) of 3, an expectation (E) of 10, and the BLOSUM62 scoring matrix (See e.g., Henikoff and Henikoff, Proc Natl Acad Sci USA 89: 10915 [1989]).

[0056] Numerous other algorithms are available and known in the art that function similarly to BLAST in providing percent identity for two sequences. Optimal alignment of sequences for comparison can be conducted using any suitable method known in the art (e.g., by the local homology algorithm of Smith and Waterman, Adv. Appl. Math. 2:482 [1981]; by the homology alignment algorithm of Needleman and Wunsch, J. Mol. Biol. 48:443 [1970]; by the search for similarity method of Pearson and Lipman, Proc. Natl. Acad. Sci. USA 85: 2444 [1988]; and/or by computerized implementations of these algorithms [GAP, BESTFIT, FASTA, and TFASTA in the GCG Wisconsin Software Package]), or by visual inspection, using methods commonly known in the art. Additionally, determination of sequence alignment and percent sequence identity can employ the BESTFIT or GAP programs in the GCG Wisconsin Software package (Accelrys, Madison WI), using the default parameters provided.

[0057] As used herein, “reference sequence” refers to a defined sequence to which another sequence is compared. A reference sequence may be a subset of a larger sequence, for example, a segment of a full-length gene or polypeptide sequence. Generally, a reference sequence is at least 20 nucleotide or amino acid residues in length, at least 25 residues in length, at least 50 residues in length, or the full length of the nucleic acid or polypeptide. Since two polynucleotides or polypeptides may each (1) comprise a sequence (i.e., a portion of the complete sequence) that is similar between the two sequences, and (2) may further comprise a sequence that is divergent between the two sequences, sequence comparisons between two (or more) polynucleotides or polypeptide are typically performed by comparing sequences of the two polynucleotides over a comparison window to identify and compare local regions of sequence similarity. The term “reference sequence” is not intended to be limited to wild-type sequences, and can include engineered or altered sequences. For example, in some embodiments, a “reference sequence” can be a previously engineered or altered amino acid sequence.

[0058] As used herein, “comparison window” refers to a conceptual segment of at least about 20 contiguous nucleotide positions or amino acids residues wherein a sequence may be compared to a reference sequence of at least 20 contiguous nucleotides or amino acids and wherein the portion of the sequence in the comparison window may comprise additions or deletions (i.e., gaps) of 20 percent or less as compared to the reference sequence (which does not comprise additions or deletions) for optimal alignment of the two sequences. The comparison window can be longer than 20 contiguous residues, and includes, optionally 30, 40, 50, 100, or longer windows.

[0059] As used herein, “corresponding to”, “reference to” or “relative to” when used in the context of the numbering of a given amino acid or polynucleotide sequence refers to the numbering of the residues of a specified reference sequence when the given amino acid or polynucleotide sequence is compared to the reference sequence. In other words, the residue number or residue position of a given polymer is designated with respect to the reference sequence rather than by the actual numerical position of the residue within the given amino acid or polynucleotide sequence. For example, a given amino acid sequence, such as that of an engineered ketoreductase, can be aligned to a reference sequence by introducing gaps to optimize residue matches between the two sequences. In these cases, although the gaps are present, the numbering of the residue in the given amino acid or polynucleotide sequence is made with respect to the reference sequence to which it has been aligned. As used herein, a reference to a residue position, such as “Xn” as further described below, is to be construed as referring to “a residue corresponding to”, unless specifically denoted otherwise. Thus, for example, “X94” refers to any amino acid at position 94 in a polypeptide sequence.

[0060] As used herein, “stereoselectivity” refers to the preferential formation in a chemical or enzymatic reaction of one stereoisomer over another stereoisomer or another set of stereoisomers. Stereoselectivity can be partial, where the formation of a stereoisomer is favored over another, or it may be complete where only one stereoisomer is formed. When the stereoisomers are enantiomers, the stereoselectivity is referred to as enantioselectivity, the fraction (typically reported as a percentage) of one enantiomer in the sum of both enantiomers. It is commonly alternatively reported in the art (typically as a percentage) as the enantiomeric excess (e.e.) calculated therefrom according to the formula [major enantiomer – minor enantiomer]/[major enantiomer + minor enantiomer]. Where the stereoisomers are diastereoisomers, the stereoselectivity is referred to as diastereoselectivity, the fraction (typically reported as a percentage) of one diastereomer in a mixture of two diastereomers, commonly alternatively reported as the diastereomeric excess (d.e.). Enantiomeric excess and diastereomeric excess are types of stereomeric excess. It is also to be understood that stereoselectivity is not limited to single stereoisomers and can be described for sets of stereoisomers.

[0061] As used herein, “highly stereoselective” refers to a chemical or enzymatic reaction that is capable of converting a substrate to its corresponding chiral alcohol product, with at least about 75% stereomeric excess.

[0062] As used herein, “increased enzymatic activity” and “increased activity” refer to an improved property of an engineered enzyme, which can be represented by an increase in specific activity (e.g., product produced/time/weight protein) or an increase in percent conversion of the substrate to the product (e.g., percent conversion of starting amount of substrate to product in a specified time period using a specified amount of ketoreductase) as compared to a reference enzyme. Exemplary methods to determine enzyme activity are provided in the Examples. Any property relating to enzyme activity may be affected, including the classical enzyme properties of Km, Vmax or kcat, changes of which can lead to increased enzymatic activity. The ketoreductase activity can be measured by any one of standard assays used for measuring ketoreductases, such as change in substrate or product concentration, or change in concentration of the cofactor (in absence of a cofactor regenerating system). Comparisons of enzyme activities are made using a defined preparation of enzyme, a defined assay under a set condition, and one or more defined substrates, as further described in detail herein. Generally, when enzymes in cell lysates are compared, the numbers of cells and the amount of protein assayed are determined as well as use of identical expression systems and identical host cells to minimize variations in amount of enzyme produced by the host cells and present in the lysates.

[0063] As used herein, “conversion” refers to the enzymatic transformation of a substrate to the corresponding product.

[0064] As used herein “percent conversion” refers to the percent of the substrate that is converted to the product within a period of time under specified conditions. Thus, for example, the “enzymatic activity” or “activity” of a ketoreductase polypeptide can be expressed as “percent conversion” of the substrate to the product.

[0065] As used herein, “thermostable” or “thermal stable” are used interchangeably to refer to a polypeptide that is resistant to inactivation when exposed to a set of temperature conditions (e.g., 40-80° C.) for a period of time (e.g., 0.5-24 hrs) compared to the untreated enzyme, thus retaining a certain level of residual activity (e.g., more than 60% to 80% for example) after exposure to elevated temperatures.

[0066] As used herein, “solvent stable” refers to the ability of a polypeptide to maintain similar activity (e.g., more than e.g., 60% to 80%) after exposure to varying concentrations (e.g., 5-99%) of solvent compared to the untreated enzyme.

[0067] As used herein, “amino acid difference” or “residue difference” refers to a difference in the amino acid residue at a position of a polypeptide sequence relative to the amino acid residue at a corresponding position in a reference sequence. The positions of amino acid differences generally are referred to herein as “Xn,” where n refers to the corresponding position in the reference sequence upon which the residue difference is based. For example, a “residue difference at position X40 as compared to SEQ ID NO: 2” refers to a difference of the amino acid residue at the polypeptide position corresponding to position 40 of SEQ ID NO: 2. Thus, if the reference polypeptide of SEQ ID NO: 2 has a histidine at position 40, then a “residue difference at position X40 as compared to SEQ ID NO: 2” refers to an amino acid substitution of any residue other than histidine at the position of the polypeptide corresponding to position 40 of SEQ ID NO: 2. In most instances herein, the specific amino acid residue difference at a position is indicated as “XnY” where “Xn” specified the corresponding position as described above, and “Y” is the single letter identifier of the amino acid found in the engineered polypeptide (i.e., the different residue than in the reference polypeptide). In some instances, the present invention also provides specific amino acid differences denoted by the conventional notation “AnB”, where A is the single letter identifier of the residue in the reference sequence, “n” is the number of the residue position in the reference sequence, and B is the single letter identifier of the residue substitution in the sequence of the engineered polypeptide. In some instances, a polypeptide of the present invention can include one or more amino acid residue differences relative to a reference sequence, which is indicated by a list of the specified positions where residue differences are present relative to the reference sequence. In some embodiments, where more than one amino acid can be used in a specific residue position of a polypeptide, the various amino acid residues that can be used are separated by a “/” (e.g., X192A/G). The present invention includes engineered polypeptide sequences comprising one or more amino acid differences that include either/or both conservative and non-conservative amino acid substitutions. The amino acid sequences of the specific recombinant ketoreductase polypeptides included in the Sequence Listing of the present invention include an initiating methionine (M) residue (i.e., M represents residue position 1). The skilled artisan, however, understands that this initiating methionine residue can be removed by biological processing machinery, such as in a host cell or in vitro translation system, to generate a mature protein lacking the initiating methionine residue, but otherwise retaining the enzyme’s properties. Consequently, the term “amino acid residue difference relative to SEQ ID NO: 2 at position Xn” as used herein may refer to position “Xn” or to the corresponding position (e.g., position (X-1)n) in a reference sequence that has been processed so as to lack the starting methionine.

[0068] As used herein, the phrase “conservative amino acid substitutions” refers to the interchangeability of residues having similar side chains, and thus typically involves substitution of the amino acid in the polypeptide with amino acids within the same or similar defined class of amino acids. By way of example and not limitation, in some embodiments, an amino acid with an aliphatic side chain is substituted with another aliphatic amino acid (e.g., alanine, valine, leucine, and isoleucine); an amino acid with a hydroxyl side chain is substituted with another amino acid with a hydroxyl side chain (e.g., serine and threonine); an amino acid having an aromatic side chain is substituted with another amino acid having an aromatic side chain (e.g., phenylalanine, tyrosine, tryptophan, and histidine); an amino acid with a basic side chain is substituted with another amino acid with a basic side chain (e.g., lysine and arginine); an amino acid with an acidic side chain is substituted with another amino acid with an acidic side chain (e.g., aspartic acid or glutamic acid); and/or a hydrophobic or hydrophilic amino acid is replaced with another hydrophobic or hydrophilic amino acid, respectively. Exemplary conservative substitutions are provided in Table 1.

TABLE 1

Exemplary Conservative Amino Acid Substitutions

| Residue | Possible Conservative Substitutions |
|---|---|
| A, L, V, I | Other aliphatic (A, L, V, I) |
| | Other non-polar (A, L, V, I, G, M) |
| G, M | Other non-polar (A, L, V, I, G, M) |
| D, E | Other acidic (D, E) |
| K, R | Other basic (K, R) |
| N, Q, S, T | Other polar |
| H, Y, W, F | Other aromatic (H, Y, W, F) |
| C, P | Non-polar |

[0069] As used herein, the phrase “non-conservative substitution” refers to substitution of an amino acid in the polypeptide with an amino acid with significantly differing side chain properties. Non-conservative substitutions may use amino acids between, rather than within, the defined groups and affects (a) the structure of the peptide backbone in the area of the substitution (e.g., proline for glycine) (b) the charge or hydrophobicity, or (c) the bulk of the side chain. By way of example and not limitation, an exemplary non-conservative substitution can be an acidic amino acid substituted with a basic or aliphatic amino acid; an aromatic amino acid substituted with a small amino acid; and a hydrophilic amino acid substituted with a hydrophobic amino acid.

[0070] As will be appreciated by those of skill in the art, some of the above-defined categories, unless otherwise specified, are not mutually exclusive. Thus, amino acids having side chains exhibiting two or more physico-chemical properties can be included in multiple categories. The appropriate classification of any amino acid or residue will be apparent to those of skill in the art, especially in light of the detailed invention provided herein.

[0071] As used herein, “deletion” refers to modification of the polypeptide by removal of one or more amino acids from the reference polypeptide. Deletions can comprise removal of 1 or more amino acids, 2 or more amino acids, 5 or more amino acids, 10 or more amino acids, 15 or more amino acids, or 20 or more amino acids, up to 10% of the total number of amino acids, or up to 20% of the total number of amino acids making up the polypeptide while retaining enzymatic activity and/or retaining the improved properties of an engineered enzyme. Deletions can be directed to the internal portions and/or terminal portions of the polypeptide. In various embodiments, the deletion can comprise a continuous segment or can be discontinuous.

[0072] As used herein, “insertion” refers to modification of the polypeptide by addition of one or more amino acids to the reference polypeptide. In some embodiments, the improved engineered ketoreductase enzymes comprise insertions of one or more amino acids to the naturally occurring ketoreductase polypeptide as well as insertions of one or more amino acids to engineered ketoreductase polypeptides. Insertions can be in the internal portions of the polypeptide, or to the carboxy or amino terminus. Insertions as used herein include fusion proteins as is known in the art. The insertion can be a contiguous segment of amino acids or separated by one or more of the amino acids in the naturally occurring polypeptide.

[0073] The term “amino acid substitution set” or “substitution set” refers to a group of amino acid substitutions in a polypeptide sequence, as compared to a reference sequence. A substitution set can have 1, 2, 3, 4, 5, 6, 7, 8, 9, 10, 11, 12, 13, 14, 15, or more amino acid substitutions. In some embodiments, a substitution set refers to the set of amino acid substitutions that is present in any of the variant KREDs listed in the Tables provided in the Examples.

[0074] As used herein, “fragment” refers to a polypeptide that has an amino-terminal and/or carboxy-terminal deletion, but where the remaining amino acid sequence is identical to the corresponding positions in the sequence. Fragments can typically have about 80%, about 90%, about 95%, about 98%, or about 99% of the full-length ketoreductase polypeptide, for example the polypeptide of SEQ ID NO:4. In some embodiments, the fragment is “biologically active” (i.e., it exhibits the same enzymatic activity as the full-length sequence).

[0075] As used herein, “isolated polypeptide” refers to a polypeptide which is substantially separated from other contaminants that naturally accompany it, e.g., protein, lipids, and polynucleotides. The term embraces polypeptides which have been removed or purified from their naturally-occurring environment or expression system (e.g., host cell or in vitro synthesis). The improved ketoreductase enzymes may be present within a cell, present in the cellular medium, or prepared in various forms, such as lysates or isolated preparations. As such, in some embodiments, the engineered ketoreductase polypeptides of the present invention can be an isolated polypeptide.

[0076] As used herein, “substantially pure polypeptide” refers to a composition in which the polypeptide species is the predominant species present (i.e., on a molar or weight basis it is more abundant than any other individual macromolecular species in the composition), and is generally a substantially purified composition when the object species comprises at least about 50 percent of the macromolecular species present by mole or % weight. Generally, a substantially pure engineered ketoreductase polypeptide composition will comprise about 60 % or more, about 70% or more, about 80% or more, about 90% or more, about 91% or more, about 92% or more, about 93% or more, about 94% or more, about 95% or more, about 96% or more, about 97% or more, about 98% or more, or about 99% of all macromolecular species by mole or % weight present in the composition. Solvent species, small molecules (<500 Daltons), and elemental ion species are not considered macromolecular species. In some embodiments, the isolated improved ketoreductase polypeptide is a substantially pure polypeptide composition.

[0077] As used herein, when used with reference to a nucleic acid or polypeptide, the term “heterologous” refers to a sequence that is not normally expressed and secreted by an organism (e.g., a wild-type organism). In some embodiments, the term encompasses a sequence that comprises two or more subsequences which are not found in the same relationship to each other as normally found in nature, or is recombinantly engineered so that its level of expression, or physical relationship to other nucleic acids or other molecules in a cell, or structure, is not normally found in nature. For instance, a heterologous nucleic acid is typically recombinantly produced, having two or more sequences from unrelated genes arranged in a manner not found in nature (e.g., a nucleic acid open reading frame (ORF) of the invention operatively linked to a promoter sequence inserted into an expression cassette, such as a vector). In some embodiments, “heterologous polynucleotide” refers to any polynucleotide that is introduced into a host cell by laboratory techniques, and includes polynucleotides that are removed from a host cell, subjected to laboratory manipulation, and then reintroduced into a host cell.

[0078] As used herein, “codon optimized” refers to changes in the codons of the polynucleotide encoding a protein to those preferentially used in a particular organism such that the encoded protein is efficiently expressed in the organism of interest. In some embodiments, the polynucleotides encoding the ketoreductase enzymes may be codon optimized for optimal production from the host organism selected for expression.

[0079] As used herein, “control sequence” is defined herein to include all components, which are necessary or advantageous for the expression of a polynucleotide and/or polypeptide of the present invention. Each control sequence may be native or foreign to the polynucleotide of interest. Such control sequences include, but are not limited to, a leader, polyadenylation sequence, propeptide sequence, promoter, signal peptide sequence, and transcription terminator.

[0080] As used herein, “operably linked” is defined herein as a configuration in which a control sequence is appropriately placed (i.e., in a functional relationship) at a position relative to a polynucleotide of interest such that the control sequence directs or regulates the expression of the polynucleotide and/or polypeptide of interest.

[0081] As used herein, the phrases “cofactor regeneration system” and “cofactor recycling system” refer to a set of reactants that participate in a reaction that reduces the oxidized form of the cofactor (e.g., NADP+ to NADPH). Cofactors oxidized by the ketoreductase-catalyzed reduction of the keto substrate are regenerated in reduced form by the cofactor regeneration system. Cofactor regeneration systems comprise a stoichiometric reductant that is a source of reducing hydrogen equivalents and is capable of reducing the oxidized form of the cofactor. The cofactor regeneration system may further comprise a catalyst, for example an enzyme catalyst that catalyzes the reduction of the oxidized form of the cofactor by the reductant. Cofactor regeneration systems to regenerate NADH or NADPH from NAD+ or NADP+, respectively, are known in the art and may be used in the methods described herein.

[0082] As used herein, “suitable reaction conditions” refer to those conditions in the biocatalytic reaction solution (e.g., ranges of enzyme loading, substrate loading, cofactor loading, temperature, pH, buffers, co-solvents, etc.) under which ketoreductase polypeptides of the present invention are capable of stereoselectively reducing a substrate compound to a product compound. Exemplary “suitable reaction conditions” are provided in the present invention and illustrated by the Examples.

[0083] As used herein, “loading,” such as in “compound loading,” “enzyme loading,” or “cofactor loading” refers to the concentration or amount of a component in a reaction mixture at the start of the reaction.

[0084] As used herein, “substrate” in the context of a biocatalyst mediated process refers to the compound or molecule acted on by the biocatalyst. For example, an exemplary substrate for the ketoreductase biocatalyst in the process disclosed herein is an iso-α-acid.

[0085] As used herein “product” in the context of a biocatalyst mediated process refers to the compound or molecule resulting from the action of the biocatalyst.

[0086] As used herein, “equilibration” as used herein refers to the process resulting in a steady state concentration of chemical species in a chemical or enzymatic reaction (e.g., interconversion of two species A and B), including interconversion of stereoisomers, as determined by the forward rate constant and the reverse rate constant of the chemical or enzymatic reaction.

[0087] As used herein, “oxo” refers to =O.

[0088] As used herein, “oxy” refers to a divalent group —O—, which may have various substituents to form different oxy groups, including ethers and esters.

[0089] As used herein, “carboxy” refers to —COOH.

[0090] As used herein, “carbonyl” refers to —C(O)—, which may have a variety of substituents to form different carbonyl groups including acids, acid halides, aldehydes, amides, esters, and ketones.

[0091] As used herein, “hydroxy” refers to —OH.

[0092] As used herein, “optional” and “optionally” means that the subsequently described event or circumstance may or may not occur, and that the description includes instances where the event or circumstance occurs and instances in which it does not. One of ordinary skill in the art would understand that with respect to any molecule described as containing one or more optional substituents, only sterically practical and/or synthetically feasible compounds are meant to be included.

[0093] As used herein, “optionally substituted” refers to all subsequent modifiers in a term or series of chemical groups. For example, in the term “optionally substituted arylalkyl, the “alkyl” portion and the “aryl” portion of the molecule may or may not be substituted, and for the series “optionally substituted alkyl, cycloalkyl, aryl and heteroaryl,” the alkyl, cycloalkyl, aryl, and heteroaryl groups, independently of the others, may or may not be substituted.

### Engineered Enzyme Polypeptides

[0094] Ketoreductase (KRED) or carbonyl reductase biocatalysts (EC 1.1.1.184) are useful for the synthesis of alcohols from aldehydes and ketones, and optically active secondary alcohols from the corresponding prostereoisomeric ketone substrates. KREDs may also catalyze the reverse reaction, (i.e., oxidation of an alcohol substrate to the corresponding aldehydes/ketone product). The reduction of aldehydes and ketones and the oxidation of alcohols by KREDs uses a co-factor, most commonly reduced nicotinamide adenine dinucleotide (NADH) or reduced nicotinamide adenine dinucleotide phosphate (NADPH), and nicotinamide adenine dinucleotide (NAD) or nicotinamide adenine dinucleotide phosphate (NADP+) for the oxidation reaction. NADH and NADPH serve as electron donors, while NAD+ and NADP+ serve as electron acceptors.

[0095] KREDs can be found in a wide range of bacteria and yeasts, as known in the art (See e.g., Hummel and Kula Eur. J. Biochem., 184:1-13 [1989]). Numerous KRED genes and enzyme sequences have been reported, including those of Candida magnoliae (Genbank Acc. No. JC7338; GI: 11360538); Candida parapsilosis (Genbank Acc. No. BAA24528.1; GI: 2815409), Sporobolomyces salmonicolor (Genbank Acc. No. AF160799; GI: 6539734), Lactobacillus kefir (Genbank Acc. No. AAP94029.1; GI: 33112056), Lactobacillus brevis (Genbank Acc. No. 1NXQ_A; GI: 30749782), and Thermoanaerobium brockii (Genbank Acc. No. P14941; GI: 1771790).

[0096] The stereoselectivity of ketoreductases have been applied to the preparation of important pharmaceutical building blocks (See e.g., Broussy et al., Org. Lett., 11:305-308 [2009]). Specific applications of naturally occurring or engineered KREDs in biocatalytic processes to generate useful chemical compounds have been demonstrated for reduction of 4-chloroacetoacetate esters (See e.g,. Zhou, J. Am. Chem. Soc.,105:5925-5926 [1983]; Santaniello, J. Chem. Res., (S)132-133 [1984]; U.S. Pat. Nos. 5,559,030; U.S. Pat. No. 5,700,670; and U.S. Pat. No. 5,891,685), reduction of dioxocarboxylic acids (See e.g., U.S. Pat. No. 6,399,339), reduction of tert-butyl (S)-chloro-5-hydroxy-3-oxohexanoate (See e.g., U.S. Pat. No. 6,645,746; and WO 01/40450), reduction of pyrrolotriazine-based compounds (See e.g., U.S. Appln. Publ. No. 2006/0286646); reduction of substituted acetophenones (See e.g., U.S. Pat. Nos. 6,800,477 and 8,748,143); and reduction of ketothiolanes (WO 2005/054491).

[0097] The iso-α-acids (“iso”) exist as a complex mixture of cis and trans epimers. In all, there are three different side chains (“R” on iso), commonly referred to as n-, ad- and co- (iBu, sBu, and iPr respectively). In addition, ad-iso (R=s-Bu) is expected to exist as a pair of enantiomers. Each of the n-, ad- and co-iso also present as a corresponding cis-/trans-isomeric pair, as well as potentially an enanatiomeric pair derived from the C4 tertiary alcohol adjacent to the ketone to be reduced. In all, not accounting for tautomers of the tetronic acid core, there are up to 16 isomers of iso-α-acids (4 R’s, cis/trans and enantiomer).

[0098] Enzymes are typically exquisitely selective for the substrate they act upon. Thus, it is unexpected that a single enzyme or even a simple mixture of two enzymes can completely convert all 16 isomers of iso-α-acids to the corresponding dihydro-(rho)-iso-α-acids. Surprisingly, the present invention comprises a process for converting iso-α-acids to dihydro-(rho)-iso-α-acids using a simple mixture of enzyme(s) and co-factor. Additionally, bio-transformation using enzymes (KREDs) allows for the manufacturing of dihydro-(rho)-iso-α-acids from iso-α-acids to be labelled/certified as “natural”.

[0099] The present invention provides engineered ketoreductases capable of indiscriminately reducing the 16 major isomers of iso-α-acids to the corresponding dihydro-(rho)-iso-α-acids by regio-selectively reducing only the ketone on the isoprenyl side chain adjacent to the tertiary alcohol, as depicted in Scheme 1.

[chemical structure]

[0100] The ketoreductase polypeptide of SEQ ID NO: 4 was selected as the initial backbone for development of the improved enzymes provided by the present invention. The enzyme of SEQ ID NO: 4 is derived from the wild-type ketoreductase from Lactobacillus kefir (SEQ ID NO: 2). The polypeptide of SEQ ID NO: 4 was chosen as the starting backbone due to its high activity in converting iso-α-acids to the corresponding dihydro-(rho)-iso-α-acids, as well as its relative substrate promiscuity and ability to convert a range of isohumulone isomers and epimers to corresponding dihydro-(rho)-iso-α-acid products. Additionally, the polypeptide of SEQ ID NO: 4 displayed activity under a variety of reaction conditions. The wild-type sequence of SEQ ID NO: 2 was found to have no detectable activity in converting iso-α-acids to the corresponding dihydro-(rho)-iso-α-acids.

[0101] The engineered ketoreductase polypeptides of the present invention are ketoreductases engineered to have improved properties as compared to the engineered ketoreductase of SEQ ID NO: 4. In some embodiments, the engineered ketoreductase polypeptides of the present invention have improved activity converting iso-α-acids to the corresponding dihydro-(rho)-iso-α-acids as compared to the engineered polypeptide of SEQ ID NO: 4. In some other embodiments, the engineered ketoreductase polypeptides of the present invention have improved activity on a range of iso-α-acid substrates, as compared to the engineered polypeptide of SEQ ID NO: 4. In some other embodiments, the engineered ketoreductase polypeptides of the present invention have improved activity on a range of substrate and cofactor concentrations, as compared to the engineered polypeptide of SEQ ID NO: 4. In some other embodiments, the engineered ketoreductase polypeptides of the present invention have improved activity at high substrate concentrations, as compared to the engineered polypeptide of SEQ ID NO: 4. In some other embodiments, the engineered ketoreductase polypeptides of the present invention have improved activity at low cofactor concentrations, as compared to the engineered polypeptide of SEQ ID NO: 4.

[0102] In some embodiments, the engineered ketoreductase polypeptides have improved activity on one or more substrates. In some embodiments, the substrate comprises a mixture of iso-α-acids. In some embodiments, the substrate comprises cis-isohumulone. In some embodiments, the substrate comprises trans-isohumulone. In some embodiments, the substrate comprises cis-isocohumulone. In some embodiments, the substrate comprises trans-isocohumulone. In some embodiments, the substrate comprises cis-isoadhumulone. In some embodiments, the substrate comprises trans-isoadhumulone.

[0103] In some embodiments, the engineered ketoreductase polypeptides have improved activity on one or more substrates. In some embodiments, the engineered ketoreductase polypeptides have improved activity on a mixture of iso-α-acids. In some embodiments, the engineered ketoreductase polypeptides have improved activity on cis-isohumulone. In some embodiments, the engineered ketoreductase polypeptides have improved activity on trans-isohumulone. In some embodiments, the engineered ketoreductase polypeptides have improved activity on cis-isocohumulone. In some embodiments, the engineered ketoreductase polypeptides have improved activity on trans-isocohumulone. In some embodiments, the engineered ketoreductase polypeptides have improved activity on cis-isoadhumulone. In some embodiments, the engineered ketoreductase polypeptides have improved activity on trans-isoadhumulone.

[0104] In some embodiments, the engineered ketoreductase polypeptides convert substrate compounds to product compounds in the presence of a cofactor recycling system. In some embodiments, the cofactor recycling system compromises a second enzyme, such as glucose dehydrogenase. In some embodiments, the cofactor recycling system comprises isopropanol.

[0105] In some embodiments, the engineered ketoreductase polypeptides are capable of converting the substrate compounds to product compounds with an activity that is increased at least about 1.2 fold, 1.5 fold, 2 fold, 3 fold, 4 fold, 5 fold, 10 fold, 20 fold, 30 fold, 40 fold, 50 fold, or 100 fold relative to the activity of the reference polypeptides of SEQ ID NO: 4, 6, 80, 104, 172, 186, 194, 252, 270, 272, 286, 328, and/or 330 under suitable reaction conditions. In some embodiments, the engineered ketoreductase polypeptides are capable of converting the substrate compounds to product compounds with a percent conversion of at least about 40%, at least about 50%, at least about 60%, at least about 70%, at least about 80%, or at least about 90%, at least about 95%, at least about 98%, at least about 99%, in a reaction time of about 48 h, about 36 h, about 24 h, or an even shorter length of time, under suitable reaction conditions.

[0106] The suitable reaction conditions can comprise a combination of reaction parameters that provide for the biocatalytic conversion of the substrate compounds to corresponding product compounds. Accordingly, in some embodiments of the process, the combination of reaction parameters comprises: (a) about 0.1 to 220 g/L of substrate compound(s); (b) about 0.5 to 50 g/L engineered polypeptide; (c) about 0.01 to 10 g/L NADP⁺ in about 10-60% isopropanol (d) about 5 to 200 mM triethanolamine∗H₂SO₄; (e) about 0 to 5 mM MgSO₄ or MgCh; (f) temperature of about 25° C. to 60° C.; and (g) pH of 6 to 10. Accordingly, in some embodiments of the process, the combination of reaction parameters comprises: (a) about 10 to 220 g/L of substrate compound(s); (b) about 0.5 to 50 g/L engineered polypeptide; (c) about 0.01 to 10 g/L NADP⁺ in about 10-60% isopropanol (d) about 5 to 200 mM potassium or sodium phosphate; (e) about 0 to 5 mM MgSO₄ or MgCl₂; (f) temperature of about 25° C. to 60° C.; and (g) pH of about 6 to 10.

[0107] In some embodiments, the combination of reaction parameters comprises: (a) about 80 g/L of substrate compound ; (b) about 20 g/L engineered polypeptide; (c) about 0.01 g/L NADP⁺ in 40% isopropanol; (d) about 100 mM triethanolamine*H₂SO₄; (e) about 2 mM MgSO₄ ; (f) about 40° C.; and (g) pH of about 8. In some embodiments, the combination of reaction parameters comprises: (a) about 160 g/L of substrate compounds; (b) about 20 g/L engineered polypeptide; (c) about 0.01 g/L NADP⁺ in 40% isopropanol; (d) about 100 mM potassium phosphate; (e) about 2 mM MgSO₄ ; (f) about 40° C.; and (g) pH of about 8.

[0108] Further exemplary reaction conditions include the assay conditions provided in the Examples.

[0109] In some embodiments, the improved engineered ketoreductase enzymes comprise amino acid residue deletions in the naturally occurring ketoreductase polypeptides or deletions of amino acid residues in other engineered ketoreductase polypeptides. Thus, in some embodiments of the invention, the deletions comprise one or more amino acids, 2 or more amino acids, 3 or more amino acids, 4 or more amino acids, 5 or more amino acids, 6 or more amino acids, 8 or more amino acids, 10 or more amino acids, 15 or more amino acids, or 20 or more amino acids, up to 10% of the total number of amino acids, up to 10% of the total number of amino acids, up to 20% of the total number of amino acids, or up to 30% of the total number of amino acids of the ketoreductase polypeptides, as long as the functional activity of the ketoreductase is maintained. In some embodiments, the deletions can comprise, 1-2, 1-3, 1-4, 1-5, 1-6, 1-7, 1-8, 1-9, 1-10, 1-11, 1-12, 1-14, 1-15, 1-16, 1-18, 1-20, 1-22, 1-24, 1-25, 1-30, 1-35 or about 1-40 amino acid residues. In some embodiments, the number of deletions can be 1, 2, 3, 4, 5, 6, 7, 8, 9, 10, 11, 12, 14, 15, 16, 18, 20, 22, 24, 26, 30, 35 or about 40 amino acids. In some embodiments, the deletions can comprise deletions of 1, 2, 3, 4, 5, 6, 7, 8, 9, 10, 11, 12, 13, 14, 15, 16, 18, or 20 amino acid residues.

[0110] As described herein, the ketoreductase polypeptides of the invention can be in the form of fusion polypeptides in which the ketoreductases are fused to other polypeptides, such as antibody tags (e.g., myc epitope) or purifications sequences (e.g., His tags). Thus, in some embodiments, the ketoreductase polypeptides find use with or without fusions to other polypeptides.

[0111] In some embodiments, the polypeptides described herein are not restricted to the genetically encoded amino acids. In addition to the genetically encoded amino acids, the polypeptides described herein may be comprised, either in whole or in part, of naturally-occurring and/or synthetic non-encoded amino acids. Certain commonly encountered non-encoded amino acids of which the polypeptides described herein may be comprised include, but are not limited to: the D-stereomers of the genetically-encoded amino acids; 2,3-diaminopropionic acid (Dpr); α-aminoisobutyric acid (Aib); ε-aminohexanoic acid (Aha); δ-aminovaleric acid (Ava); N-methylglycine or sarcosine (MeGly or Sar); omithine (Om); citrulline (Cit); t-butylalanine (Bua); t-butylglycine (Bug); N-methylisoleucine (MeIle); phenylglycine (Phg); cyclohexylalanine (Cha); norleucine (Nle); naphthylalanine (Nal); 2-chlorophenylalanine (Ocf); 3-chlorophenylalanine (Mcf); 4-chlorophenylalanine (Pcf); 2-fluorophenylalanine (Off); 3-fluorophenylalanine (Mff); 4-fluorophenylalanine (Pff); 2-bromophenylalanine (Obf); 3-bromophenylalanine (Mbf); 4-bromophenylalanine (Pbf); 2-methylphenylalanine (Omf); 3-methylphenylalanine (Mmf); 4-methylphenylalanine (Pmf); 2-nitrophenylalanine (Onf); 3-nitrophenylalanine (Mnf); 4-nitrophenylalanine (Pnf); 2-cyanophenylalanine (Ocf); 3-cyanophenylalanine (Mcf); 4-cyanophenylalanine (Pcf); 2-trifluoromethylphenylalanine (Otf); 3-trifluoromethylphenylalanine (Mtf); 4-trifluoromethylphenylalanine (Ptf); 4-aminophenylalanine (Paf); 4-iodophenylalanine (Pif); 4-aminomethylphenylalanine (Pamf); 2,4-dichlorophenylalanine (Opef); 3,4-dichlorophenylalanine (Mpcf); 2,4-difluorophenylalanine (Opff); 3,4-difluorophenylalanine (Mpff); pyrid-2-ylalanine (2pAla); pyrid-3-ylalanine (3pAla); pyrid-4-ylalanine (4pAla); naphth-1-ylalanine (1nAla); naphth-2-ylalanine (2nAla); thiazolylalanine (taAla); benzothienylalanine (bAla); thienylalanine (tAla); furylalanine (fAla); homophenylalanine (hPhe); homotyrosine (hTyr); homotryptophan (hTrp); pentafluorophenylalanine (5ff); styrylkalanine (sAla); authrylalanine (aAla); 3,3-diphenylalanine (Dfa); 3-amino-5-phenypentanoic acid (Afp); penicillamine (Pen); 1,2,3,4-tetrahydroisoquinoline-3-carboxylic acid (Tic); β-2-thienylalanine (Thi); methionine sulfoxide (Mso); N(w)-nitroarginine (nArg); homolysine (hLys); phosphonomethylphenylalanine (pmPhe); phosphoserine (pSer); phosphothreonine (pThr); homoaspartic acid (hAsp); homoglutanic acid (hGlu); 1-aminocyclopent-(2 or 3)-ene-4 carboxylic acid; pipecolic acid (PA), azetidine-3-carboxylic acid (ACA); 1-aminocyclopentane-3-carboxylic acid; allylglycine (aOly); propargylglycine (pgGly); homoalanine (hAla); norvaline (nVal); homoleucine (hLeu), homovaline (hVal); homoisolencine (hIle); homoarginine (hArg); N-acetyl lysine (AcLys); 2,4-diaminobutyric acid (Dbu); 2,3-diaminobutyric acid (Dab); N-methylvaline (MeVal); homocysteine (hCys); homoserine (hSer); hydroxyproline (Hyp) and homoproline (hPro). Additional non-encoded amino acids of which the polypeptides described herein may be comprised are apparent to those of skill in the art. These amino acids may be in either the L- or D-configuration.

[0112] Those of skill in the art will recognize that amino acids or residues bearing side chain protecting groups may also comprise the polypeptides described herein. Non-limiting examples of such protected amino acids, which in this case belong to the aromatic category, include (protecting groups listed in parentheses), but are not limited to: Arg(tos), Cys(methylbenzyl), Cys (nitropyridinesulfenyl), Glu(δ-benzylester), Gln(xanthyl), Asn(N-8-xanthyl), His(bom), His(benzyl), His(tos), Lys(finoc), Lys(tos), Ser(O-benzyl), Thr (O-benzyl) and Tyr(O-benzyl).

[0113] Non-encoding amino acids that are conformationally constrained of which the polypeptides described herein may be composed include, but are not limited to, N-methyl amino acids (L-configuration); 1-aminocyclopent-(2 or 3)-ene-4-carboxylic acid; pipecolic acid; azetidine-3-carboxylic acid; homoproline (hPro); and 1-aminocyclopentane-3-carboxylic acid.

[0114] As described above the various modifications introduced into the naturally occurring polypeptide to generate an engineered ketoreductase enzyme can be targeted to a specific property of the enzyme.

### Polynucleotides Encoding Engineered Enzymes

[0115] In another aspect, the present invention provides polynucleotides encoding the engineered ketoreductase. The polynucleotides may be operatively linked to one or more heterologous regulatory sequences that control gene expression to create a recombinant polynucleotide capable of expressing the polypeptide. Expression constructs containing a heterologous polynucleotide encoding the engineered ketoreductase can be introduced into appropriate host cells to express the corresponding ketoreductase polypeptide.

[0116] Because of the knowledge of the codons corresponding to the various amino acids, availability of a protein sequence provides a description of all the polynucleotides capable of encoding the subject. The degeneracy of the genetic code, where the same amino acids are encoded by alternative or synonymous codons allows an extremely large number of nucleic acids to be made, all of which encode the improved ketoreductase enzymes disclosed herein. Thus, having identified a particular amino acid sequence, those skilled in the art could make any number of different nucleic acids by simply modifying the sequence of one or more codons in a way which does not change the amino acid sequence of the protein. In this regard, the present invention specifically contemplates each and every possible variation of polynucleotides that could be made by selecting combinations based on the possible codon choices, and all such variations are to be considered specifically disclosed for any polypeptide disclosed herein, including the amino acid sequences presented in the Tables in the Examples. In various embodiments, the codons are preferably selected to fit the host cell in which the protein is being produced. For example, preferred codons used in bacteria are used to express the gene in bacteria; preferred codons used in yeast are used for expression in yeast; and preferred codons used in mammals are used for expression in mammalian cells.

[0117] In some embodiments, the polynucleotide comprises a nucleotide sequence encoding the naturally occurring ketoreductase polypeptide amino acid sequence, as represented by SEQ ID NO: 1. In some embodiments, the polynucleotide has a nucleic acid sequence comprising at least 80%, 85%, 90%, 91%, 92%, 93%, 94%, 95%, 96%, 97%, 98%, 99% or more identity to the nucleic acid sequences of SEQ ID NO: 3, 5, 79, 103, 171, 185, 193, 251, 269, 271, 285, 327 and/or 329 each of which encodes the identical polypeptide sequences of SEQ ID NO: 4, 6, 80, 104, 172, 186, 194, 252, 270, 272, 286, 328, and/or 330, respectively.

[0118] In some embodiments, the enzyme polynucleotide encodes an engineered polypeptide having enzyme activity with the properties disclosed herein, wherein the polypeptide comprises an amino acid sequence having at least 60%, 65%, 70%, 75%, 80%, 85%, 86%, 87%, 88%, 89%, 90%, 91%, 92%, 93%, 94%, 95%, 96%, 97%, 98%, 99% or more identity to a reference sequence selected from the SEQ ID NOS provided herein, or the amino acid sequence of any variant (e.g., those provided in the Examples), and one or more residue differences as compared to the reference polynucleotide(s), or the amino acid sequence of any variant as disclosed in the Examples (for example 1, 2, 3, 4, 5, 6, 7, 8, 9, 10 or more amino acid residue positions). In some embodiments, the reference polypeptide sequence is selected from SEQ ID NOS: 4, 6, 80, 104, 172, 186, 194, 252, 270, 272, 286, 328, and/or 330.

[0119] In some embodiments, the polynucleotide encoding the engineered ketoreductase comprises a polynucleotide sequence having at least 60%, 65%, 70%, 75%, 80%, 85%, 86%, 87%, 88%, 89%, 90%, 91%, 92%, 93%, 94%, 95%, 96%, 97%, 98%, 99% or more identity to a sequence selected from SEQ ID NOS: 3, 5, 79, 103, 171, 185, 193, 251, 269, 271, 285, 327 and/or 329. In some embodiments, the polynucleotide encoding the engineered ketoreductase comprises SEQ ID NO: 5, 79, 103, 171, 185, 193, 251, 269, 271, 285, 327 and/or 329. In some embodiments, the polynucleotide encoding the engineered ketoreductase comprises a polynucleotide sequence having at least 60%, 65%, 70%, 75%, 80%, 85%, 86%, 87%, 88%, 89%, 90%, 91%, 92%, 93%, 94%, 95%, 96%, 97%, 98%, 99% or more identity to a sequence selected from SEQ ID NOS: 5 to 411. In some embodiments, the polynucleotide encoding the engineered ketoreductase comprises a polynucleotide sequence selected from SEQ ID NOS: 5 to 411.

[0120] In some embodiments, the engineered ketoreductase sequences comprise sequences that comprise positions identified to be beneficial, as described in the Examples.

[0121] In some embodiments, isolated polynucleotides encoding an improved ketoreductase are manipulated in a variety of ways to provide for improved expression and/or production of the polypeptides. Manipulation of the isolated polynucleotide prior to its insertion into a vector may be desirable or necessary, depending on the expression vector used. The techniques for modifying polynucleotides and nucleic acid sequences utilizing recombinant DNA methods are well known in the art.

[0122] For bacterial host cells, suitable promoters for directing transcription of the nucleic acid constructs of the present invention, include the promoters obtained from the E.coli lac operon, Streptomyces coelicolor agarase gene (dagA), Bacillus subtilis levansucrase gene (sacB), Bacillus licheniformis alpha-amylase gene (amyL), Bacillus stearothermophilus maltogenic amylase gene (amyM), Bacillus amyloliquefaciens alpha-amylase gene (amyQ), Bacillus licheniformis penicillinase gene (penP), Bacillus subtilis xylA and xylB genes, and prokaryotic beta-lactamase gene (See e.g., Villa-Kamaroffet al., Proc. Natl. Acad. Sci. USA 75: 3727-3731 [1978]), as well as the tac promoter (See e.g., DeBoer et al., Proc. Natl Acad. Sci. USA 80: 21-25 [1983]). Additional suitable promoters are known to those in the art.

[0123] For filamentous fungal host cells, suitable promoters for directing the transcription of the nucleic acid constructs of the present invention include promoters obtained from the genes for Aspergillus oryzae TAKA amylase, Rhizomucor miehei aspartic proteinase, Aspergillus niger neutral alpha-amylase, Aspergillus niger acid stable alpha-amylase, Aspergillus niger or Aspergillus awamori glucoamylase (glaA), Rhizomucor miehei lipase, Aspergillus oryzae alkaline protease, Aspergillus oryzae triose phosphate isomerase, Aspergillus nidulans acetamidase, and Fusarium oxysporum trypsin-like protease (WO 96/00787), as well as the NA2-tpi promoter (a hybrid of the promoters from the genes for Aspergillus niger neutral alpha-amylase and Aspergillus oryzae triose phosphate isomerase), and mutant, truncated, and hybrid promoters thereof.

[0124] In a yeast host, useful promoters include, but are not limited to those from the genes for Saccharomyces cerevisiae enolase (ENO-1), Saccharomyces cerevisiae galactokinase (GAL1), Saccharomyces cerevisiae alcohol dehydrogenase/glyceraldehyde-3-phosphate dehydrogenase (ADH2/GAP), and Saccharomyces cerevisiae 3-phosphoglycerate kinase, as well as other useful promoters for yeast host cells (See e.g., Romanos et al., Yeast 8:423-488 [1992]).

[0125] The control sequence may also be a suitable transcription terminator sequence, a sequence recognized by a host cell to terminate transcription. The terminator sequence is operably linked to the 3′ terminus of the nucleic acid sequence encoding the polypeptide. Any terminator that is functional in the host cell of choice may be used in the present invention.

[0126] For example, exemplary transcription terminators for filamentous fungal host cells can be obtained from the genes for Aspergillus oryzae TAKA amylase, Aspergillus niger glucoamylase, Aspergillus nidulans anthranilate synthase, Aspergillus niger alpha-glucosidase, and Fusarium oxysporum trypsin-like protease.

[0127] Exemplary terminators for yeast host cells can be obtained from the genes for Saccharomyces cerevisiae enolase, Saccharomyces cerevisiae cytochrome C (CYC1), and Saccharomyces cerevisiae glyceraldehyde-3-phosphate dehydrogenase, as well as other useful terminators for yeast host cells known in the art (See e.g,. Romanos et al., supra).

[0128] The control sequence may also be a suitable leader sequence, a nontranslated region of an mRNA that is important for translation by the host cell. The leader sequence is operably linked to the 5′ terminus of the nucleic acid sequence encoding the polypeptide. Any leader sequence that is functional in the host cell of choice may be used. Exemplary leaders for filamentous fungal host cells are obtained from the genes for Aspergillus oryzae TAKA amylase and Aspergillus nidulans triose phosphate isomerase. Suitable leaders for yeast host cells are obtained from the genes for Saccharomyces cerevisiae enolase (ENO-1), Saccharomyces cerevisiae 3-phosphoglycerate kinase, Saccharomyces cerevisiae alpha-factor, and Saccharomyces cerevisiae alcohol dehydrogenase/glyceraldehyde-3-phosphate dehydrogenase (ADH2/GAP).

[0129] The control sequence may also be a polyadenylation sequence, a sequence operably linked to the 3′ terminus of the nucleic acid sequence and which, when transcribed, is recognized by the host cell as a signal to add polyadenosine residues to transcribed mRNA. Any polyadenylation sequence which is functional in the host cell of choice may be used in the present invention. Exemplary polyadenylation sequences for filamentous fungal host cells can be from the genes for Aspergillus oryzae TAKA amylase, Aspergillus niger glucoamylase, Aspergillus nidulans anthranilate synthase, Fusarium oxysporum trypsin-like protease, and Aspergillus niger alpha-glucosidase., as well as additional useful polyadenylation sequences for yeast host cells known in the art (See e.g., Guo et al., Mol. Cell. Biol., 15:5983-5990 [1995]).

[0130] The control sequence may also be a signal peptide coding region that codes for an amino acid sequence linked to the amino terminus of a polypeptide and directs the encoded polypeptide into the cell’s secretory pathway. The 5′ end of the coding sequence of the nucleic acid sequence may inherently contain a signal peptide coding region naturally linked in translation reading frame with the segment of the coding region that encodes the secreted polypeptide. Alternatively, the 5′ end of the coding sequence may contain a signal peptide coding region that is foreign to the coding sequence. The foreign signal peptide coding region may be required where the coding sequence does not naturally contain a signal peptide coding region.

[0131] Alternatively, the foreign signal peptide coding region may simply replace the natural signal peptide coding region in order to enhance secretion of the polypeptide. However, any signal peptide coding region which directs the expressed polypeptide into the secretory pathway of a host cell of choice may be used in the present invention.

[0132] Effective signal peptide coding regions for bacterial host cells are the signal peptide coding regions obtained from the genes for Bacillus NClB 11837 maltogenic amylase, Bacillus stearothermophilus alpha-amylase, Bacillus licheniformis subtilisin, Bacillus licheniformis beta-lactamase, Bacillus stearothermophilus neutral proteases (nprT, nprS, nprM), and Bacillus subtilis prsA,, as well as additional signal peptides known in the art (See e.g., Simonen et al., Microbiol. Rev., 57: 109-137 [1993]).

[0133] Effective signal peptide coding regions for filamentous fungal host cells include, but are not limited to the signal peptide coding regions obtained from the genes for Aspergillus oryzae TAKA amylase, Aspergillus niger neutral amylase, Aspergillus niger glucoamylase, Rhizomucor miehei aspartic proteinase, Humicola insolens cellulase, and Humicola lanuginosa lipase. Useful signal peptides for yeast host cells can be from the genes for Saccharomyces cerevisiae alpha-factor and Saccharomyces cerevisiae invertase, as well as additional useful signal peptide coding regions (See e.g., Romanos et al., 1992, supra).

[0134] The control sequence may also be a propeptide coding region that codes for an amino acid sequence positioned at the amino terminus of a polypeptide. The resultant polypeptide is known as a proenzyme or propolypeptide (or a zymogen in some cases). A propolypeptide is generally inactive and can be converted to a mature active polypeptide by catalytic or autocatalytic cleavage of the propeptide from the propolypeptide. The propeptide coding region may be obtained from the genes for Bacillus subtilis alkaline protease (aprE), Bacillus subtilis neutral protease (nprT), Saccharomyces cerevisiae alpha-factor, Rhizomucor miehei aspartic proteinase, and Myceliophthora thermophila lactase (WO 95/33836).

[0135] Where both signal peptide and propeptide regions are present at the amino terminus of a polypeptide, the propeptide region is positioned next to the amino terminus of a polypeptide and the signal peptide region is positioned next to the amino terminus of the propeptide region.

[0136] It may also be desirable to add regulatory sequences, which allow the regulation of the expression of the polypeptide relative to the growth of the host cell. Examples of regulatory systems are those which cause the expression of the gene to be turned on or off in response to a chemical or physical stimulus, including the presence of a regulatory compound. In prokaryotic host cells, suitable regulatory sequences include the lac, tac, and trp operator systems. In yeast host cells, suitable regulatory systems include, as examples, the ADH2 system or GAL1 system. In filamentous fungi, suitable regulatory sequences include the TAKA alpha-amylase promoter, Aspergillus niger glucoamylase promoter, and Aspergillus oryzae glucoamylase promoter.

[0137] Other examples of regulatory sequences are those which allow for gene amplification. In eukaryotic systems, these include the dihydrofolate reductase gene, which is amplified in the presence of methotrexate, and the metallothionein genes, which are amplified with heavy metals. In these cases, the nucleic acid sequence encoding the KRED polypeptide of the present invention would be operably linked with the regulatory sequence.

[0138] Thus, in some embodiments, the present invention is also directed to a recombinant expression vector comprising a polynucleotide encoding an engineered ketoreductase polypeptide or a variant thereof, and one or more expression regulating regions such as a promoter and a terminator, a replication origin, etc., depending on the type of hosts into which they are to be introduced. The various nucleic acid and control sequences described above may be joined together to produce a recombinant expression vector which may include one or more convenient restriction sites to allow for insertion or substitution of the nucleic acid sequence encoding the polypeptide at such sites. Alternatively, the nucleic acid sequence of the present invention may be expressed by inserting the nucleic acid sequence or a nucleic acid construct comprising the sequence into an appropriate vector for expression. In creating the expression vector, the coding sequence is located in the vector so that the coding sequence is operably linked with the appropriate control sequences for expression.

[0139] The recombinant expression vector may be any vector (e.g., a plasmid or virus), which can be conveniently subjected to recombinant DNA procedures and can bring about the expression of the polynucleotide sequence. The choice of the vector will typically depend on the compatibility of the vector with the host cell into which the vector is to be introduced. The vectors may be linear or closed circular plasmids.

[0140] The expression vector may be an autonomously replicating vector (i.e., a vector that exists as an extrachromosomal entity), the replication of which is independent of chromosomal replication, (e.g., a plasmid, an extrachromosomal element, a minichromosome, or an artificial chromosome). The vector may contain any means for assuring self-replication. Alternatively, the vector may be one which, when introduced into the host cell, is integrated into the genome and replicated together with the chromosome(s) into which it has been integrated. Furthermore, a single vector or plasmid or two or more vectors or plasmids which together contain the total DNA to be introduced into the genome of the host cell, or a transposon may be used.

[0141] The expression vector of the present invention preferably contains one or more selectable markers, which permit easy selection of transformed cells. A selectable marker can be a gene the product of which provides for biocide or viral resistance, resistance to heavy metals, prototrophy to auxotrophs, and the like. Examples of bacterial selectable markers are the dal genes from Bacillus subtilis or Bacillus licheniformis, or markers, which confer antibiotic resistance such as ampicillin, kanamycin, chloramphenicol, or tetracycline resistance. Suitable markers for yeast host cells are ADE2, HIS3, LEU2, LYS2, MET3, TRP1, and URA3.

[0142] Selectable markers for use in a filamentous fungal host cell include, but are not limited to, amdS (acetamidase), argB (ornithine carbamoyltransferase), bar (phosphinothricin acetyltransferase), hph (hygromycin phosphotransferase), niaD (nitrate reductase), pyrG (orotidine-5′-phosphate decarboxylase), sC (sulfate adenyltransferase), and trpC (anthranilate synthase), as well as equivalents thereof. Embodiments for use in an Aspergillus cell include the amdS and pyrG genes of Aspergillus nidulans or Aspergillus oryzae and the bar gene of Streptomyces hygroscopicus.

[0143] The expression vectors of the present invention can contain an element(s) that permits integration of the vector into the host cell’s genome or autonomous replication of the vector in the cell independent of the genome. For integration into the host cell genome, the vector may rely on the nucleic acid sequence encoding the polypeptide or any other element of the vector for integration of the vector into the genome by homologous or nonhomologous recombination.

[0144] Alternatively, the expression vector may contain additional nucleic acid sequences for directing integration by homologous recombination into the genome of the host cell. The additional nucleic acid sequences enable the vector to be integrated into the host cell genome at a precise location(s) in the chromosome(s). To increase the likelihood of integration at a precise location, the integrational elements should preferably contain a sufficient number of nucleic acids, such as 100 to 10,000 base pairs, preferably 400 to 10,000 base pairs, and most preferably 800 to 10,000 base pairs, which are highly homologous with the corresponding target sequence to enhance the probability of homologous recombination. The integrational elements may be any sequence that is homologous with the target sequence in the genome of the host cell. Furthermore, the integrational elements may be non-encoding or encoding nucleic acid sequences. On the other hand, the vector may be integrated into the genome of the host cell by non-homologous recombination.

[0145] For autonomous replication, the vector may further comprise an origin of replication enabling the vector to replicate autonomously in the host cell in question. Examples of bacterial origins of replication are P15A ori or the origins of replication of plasmids pBR322, pUC19, pACYC177 (which plasmid has the P15A ori), or pACYC184 permitting replication in E. coli, and pUB110, pE194, pTA1060, or pAMβ1 permitting replication in Bacillus. Examples of origins of replication for use in a yeast host cell are the 2 micron origin of replication, ARS1, ARS4, the combination of ARS1 and CEN3, and the combination of ARS4 and CEN6. The origin of replication may be one having a mutation which makes its functioning temperature-sensitive in the host cell (See e.g., Ehrlich, Proc. Natl. Acad. Sci. USA 75:1433 [1978]).

[0146] More than one copy of a nucleic acid sequence of the present invention may be inserted into the host cell to increase production of the gene product. An increase in the copy number of the nucleic acid sequence can be obtained by integrating at least one additional copy of the sequence into the host cell genome or by including an amplifiable selectable marker gene with the nucleic acid sequence where cells containing amplified copies of the selectable marker gene, and thereby additional copies of the nucleic acid sequence, can be selected for by cultivating the cells in the presence of the appropriate selectable agent.

[0147] It is not intended that the present invention be limited to the expression vectors disclosed herein. Those of skill in the art will recognize that any suitable expression vector may be used in the present invention. Many of the expression vectors for use in the present invention are commercially available. Suitable commercial expression vectors include, but are not limited to p3xFLAGTM™ expression vectors (Sigma-Aldrich), which include a CMV promoter and hGH polyadenylation site for expression in mammalian host cells and a pBR322 origin of replication and ampicillin resistance markers for amplification in E. coli. Other commercially available suitable expression vectors include but are not limited to the pBluescriptII SK(-) and pBK-CMV vectors (Stratagene), and plasmids derived from pBR322 (Gibco BRL), pUC (Gibco BRL), pREP4, pCEP4 (Invitrogen) or pPoly (See, Lathe et al., Gene 57:193-201 [1987]).

### Host Cells for Expression of Engineered Polypeptides

[0148] The present invention also provides a host cell comprising a polynucleotide encoding an improved ketoreductase polypeptide of the present invention, the polynucleotide being operatively linked to one or more control sequences for expression of the ketoreductase enzyme in the host cell. Host cells for use in expressing the KRED polypeptides encoded by the expression vectors of the present invention are well known in the art and include but are not limited to, bacterial cells, such as E. coli, Lactobacillus kefir, Lactobacillus brevis, Lactobacillus minor, Streptomyces and Salmonella typhimurium cells; fungal cells, such as yeast cells (e.g., Saccharomyces cerevisiae or Pichia pastoris (ATCC Accession No. 201178)); insect cells such as Drosophila S2 and Spodoptera Sf9 cells; animal cells such as CHO, COS, BHK, 293, and Bowes melanoma cells; and plant cells. Appropriate culture media and growth conditions for the above-described host cells are well known in the art.

[0149] Polynucleotides for expression of the ketoreductase may be introduced into cells by various methods known in the art. Techniques include among others, electroporation, biolistic particle bombardment, liposome mediated transfection, calcium chloride transfection, and protoplast fusion. Various methods for introducing polynucleotides into cells will be apparent to the skilled artisan.

[0150] Escherichia coli W3110 is a host strain that finds use in the present invention, although it is not intended that the present invention be limited to this specific host strain. The expression vector was created by operatively linking a polynucleotide encoding an improved enzyme into the plasmid pCK1 10900 operatively linked to the lac promoter under control of the lacI repressor. The expression vector also contained the P15a origin of replication and the chloramphenicol resistance gene. Cells containing the subject polynucleotide in Escherichia coli W3110 can be isolated by subjecting the cells to chloramphenicol selection.

### Methods of Generating Engineered Ketoreductase Polypeptides

[0151] In some embodiments, to make the improved KRED polynucleotides and polypeptides of the present invention, the naturally-occurring ketoreductase enzyme that catalyzes the reduction reaction is obtained (or derived) from Lactobacillus kefir. In some embodiments, the parent polynucleotide sequence is codon optimized to enhance expression of the ketoreductase in a specified host cell. As an illustration, the parental polynucleotide sequence encoding the wild-type KRED polypeptide of Lactobacillus kefir was constructed from oligonucleotides prepared based upon the known polypeptide sequence of Lactobacillus kefir KRED sequence available from the Genbank database. The parental polynucleotide sequence was codon optimized for expression in E. coli and the codon-optimized polynucleotide cloned into an expression vector, placing the expression of the ketoreductase gene under the control of the lac promoter and lacI repressor gene. Clones expressing the active ketoreductase in E. coli were identified and the genes sequenced to confirm their identity.

[0152] In some embodiments, the engineered ketoreductases are obtained by subjecting the polynucleotide encoding the naturally occurring ketoreductase to mutagenesis and/or directed evolution methods, as discussed above. Mutagenesis may be performed in accordance with any of the techniques known in the art, including random and site-specific mutagenesis. Directed evolution can be performed with any of the techniques known in the art to screen for improved promoter variants including shuffling. Mutagenesis and directed evolution methods are well known in the art (See e.g., U.S. Pat. Nos. 5,605,793, 5,811,238, 5,830,721, 5,834,252, 5,837,458, 5,928,905, 6,096,548, 6,117,679, 6,132,970, 6,165,793, 6,180,406, 6,251,674, 6,265,201, 6,277,638, 6,287,861, 6,287,862, 6,291,242, 6,297,053, 6,303,344, 6,309,883, 6,319,713, 6,319,714, 6,323,030, 6,326,204, 6,335,160, 6,335,198, 6,344,356, 6,352,859, 6,355,484, 6,358,740, 6,358,742, 6,365,377, 6,365,408, 6,368,861, 6,372,497, 6,337,186, 6,376,246, 6,379,964, 6,387,702, 6,391,552, 6,391,640, 6,395,547, 6,406,855, 6,406,910, 6,413,745, 6,413,774, 6,420,175, 6,423,542, 6,426,224, 6,436,675, 6,444,468, 6,455,253, 6,479,652, 6,482,647, 6,483,011, 6,484,105, 6,489,146, 6,500,617, 6,500,639, 6,506,602, 6,506,603, 6,518,065, 6,519,065, 6,521,453, 6,528,311, 6,537,746, 6,573,098, 6,576,467, 6,579,678, 6,586,182, 6,602,986, 6,605,430, 6,613,514, 6,653,072, 6,686,515, 6,703,240, 6,716,631, 6,825,001, 6,902,922, 6,917,882, 6,946,296, 6,961,664, 6,995,017, 7,024,312, 7,058,515, 7,105,297, 7,148,054, 7,220,566, 7,288,375, 7,384,387, 7,421,347, 7,430,477, 7,462,469, 7,534,564, 7,620,500, 7,620,502, 7,629,170, 7,702,464, 7,747,391, 7,747,393, 7,751,986, 7,776,598, 7,783,428, 7,795,030, 7,853,410, 7,868,138, 7,783,428, 7,873,477, 7,873,499, 7,904,249, 7,957,912, 7,981,614, 8,014,961, 8,029,988, 8,048,674, 8,058,001, 8,076,138, 8,108,150, 8,170,806, 8,224,580, 8,377,681, 8,383,346, 8,457,903, 8,504,498, 8,589,085, 8,762,066, 8,768,871, 9,593,326, and all related non-US counterparts; Ling et al., Anal. Biochem., 254(2):157-78 [1997]; Dale etal., Meth. Mol. Biol., 57:369-74 [1996]; Smith, Ann. Rev. Genet., 19:423-462 [1985]; Botstein et al., Science, 229:1193-1201 [1985]; Carter, Biochem. J., 237:1-7 [1986]; Kramer etal., Cell, 38:879-887 [1984]; Wells etal., Gene, 34:315-323 [1985]; Minshull et al., Curr. Op. Chem. Biol., 3: 284-290 [1999]; Christians et al., Nat. Biotechnol., 17: 259-264 [1999]; Crameri et al., Nature, 391: 288-291 [1998]; Crameri, et al., Nat. Biotechnol., 15:436-438 [1997]; Zhang et al., Proc. Nat. Acad. Sci. U.S.A., 94:4504-4509 [1997]; Crameri et al., Nat. Biotechnol., 14:315-319 [1996]; Stemmer, Nature, 370:389-391 [1994]; Stemmer, Proc. Nat. Acad. Sci. USA, 91:10747-10751 [1994]; WO 95/22625; WO 97/0078; WO 97/35966; WO 98/27230; WO 00/42651; WO 01/75767; and WO 2009/152336, all of which are incorporated herein by reference).

[0153] The clones obtained following mutagenesis treatment are screened for engineered ketoreductases having a desired improved enzyme property. Measuring enzyme activity from the expression libraries can be performed using the standard biochemistry technique of monitoring the rate of decrease (via a decrease in absorbance or fluorescence) of NADH or NADPH concentration, as it is converted into NAD⁺ or NADP⁺. In this reaction, the NADH or NADPH is consumed (oxidized) by the ketoreductase as the ketoreductase reduces a ketone substrate to the corresponding hydroxyl group. The rate of decrease of NADH or NADPH concentration, as measured by the decrease in absorbance or fluorescence, per unit time indicates the relative (enzymatic) activity of the KRED polypeptide in a fixed amount of the lysate (or a lyophilized powder made therefrom). The stereochemistry of the products can be ascertained by various known techniques, and as provided in the Examples. Where the improved enzyme property desired is thermal stability, enzyme activity may be measured after subjecting the enzyme preparations to a defined temperature and measuring the amount of enzyme activity remaining after heat treatments. Clones containing a polynucleotide encoding a ketoreductase are then isolated, sequenced to identify the nucleotide sequence changes (if any), and used to express the enzyme in a host cell.

[0154] Where the sequence of the engineered polypeptide is known, the polynucleotides encoding the enzyme can be prepared by standard solid-phase methods, according to known synthetic methods. In some embodiments, fragments of up to about 100 bases can be individually synthesized, then joined (e.g., by enzymatic or chemical ligation methods, or polymerase mediated methods) to form any desired continuous sequence. For example, polynucleotides and oligonucleotides of the invention can be prepared by chemical synthesis (e.g., using the classical phosphoramidite method described by Beaucage et al., Tet. Lett., 22: 1859-69 [1981], or the method described by Matthes et al., EMBO J., 3:801-05 [1984], as it is typically practiced in automated synthetic methods). According to the phosphoramidite method, oligonucleotides are synthesized (e.g., in an automatic DNA synthesizer), purified, annealed, ligated and cloned in appropriate vectors. In addition, essentially any nucleic acid can be obtained from any of a variety of commercial sources (e.g., The Midland Certified Reagent Company, Midland, TX, The Great American Gene Company, Ramona, CA, ExpressGen Inc. Chicago, IL, Operon Technologies Inc., Alameda, CA, and many others).

[0155] Engineered ketoreductase enzymes expressed in a host cell can be recovered from the cells and or the culture medium using any one or more of the well known techniques for protein purification, including, among others, lysozyme treatment, sonication, filtration, salting-out, ultra-centrifugation, and chromatography. Suitable solutions for lysing and the high efficiency extraction of proteins from bacteria, such as E. coli, are commercially available under the trade name CelLytic B™ (Sigma-Aldrich).

[0156] Chromatographic techniques for isolation of the ketoreductase polypeptides include, among others, reverse phase chromatography high performance liquid chromatography, ion exchange chromatography, gel electrophoresis, and affinity chromatography. Conditions for purifying a particular enzyme will depend, in part, on factors such as net charge, hydrophobicity, hydrophilicity, molecular weight, molecular shape, etc., and will be apparent to those having skill in the art.

[0157] In some embodiments, affinity techniques are used to isolate the improved ketoreductase enzymes. For affinity chromatography purification, any antibody which specifically binds the ketoreductase polypeptide may be used. For the production of antibodies, various host animals, including but not limited to rabbits, mice, rats, etc., may be immunized by injection with the ketoreductase. The ketoreductase polypeptide may be attached to a suitable carrier, such as BSA, by means of a side chain functional group or linkers attached to a side chain functional group. Various adjuvants may be used to increase the immunological response, depending on the host species, including but not limited to Freund’s (complete and incomplete), mineral gels such as aluminum hydroxide, surface active substances such as lysolecithin, pluronic polyols, polyanions, peptides, oil emulsions, keyhole limpet hemocyanin, dinitrophenol, and potentially useful human adjuvants such as BCG (Bacillus Calmette Guerin) and Corynebacterium parvum.

[0158] The ketoreductases may be prepared and used in the form of cells expressing the enzymes, as crude extracts, or as isolated or purified preparations. The ketoreductases may be prepared as lyophilizates, in powder form (e.g., acetone powders), or prepared as enzyme solutions. In some embodiments, the ketoreductases can be in the form of substantially pure preparations.

[0159] In some embodiments, the ketoreductase polypeptides can be attached to a solid substrate. The substrate can be a solid phase, surface, and/or membrane. A solid support can be composed of organic polymers such as polystyrene, polyethylene, polypropylene, polyfluoroethylene, polyethyleneoxy, and polyacrylamide, as well as co-polymers and grafts thereof. A solid support can also be inorganic, such as glass, silica, controlled pore glass (CPG), reverse phase silica or metal, such as gold or platinum. The configuration of the substrate can be in the form of beads, spheres, particles, granules, a gel, a membrane or a surface. Surfaces can be planar, substantially planar, or non-planar. Solid supports can be porous or non-porous, and can have swelling or non-swelling characteristics. A solid support can be configured in the form of a well, depression, or other container, vessel, feature, or location. A plurality of supports can be configured on an array at various locations, addressable for robotic delivery of reagents, or by detection methods and/or instruments.

[0160] As is known by those of skill in the art, ketoreductase-catalyzed reduction reactions typically require a cofactor. Reduction reactions catalyzed by the engineered ketoreductase enzymes described herein also typically require a cofactor, although many embodiments of the engineered ketoreductases require far less cofactor than reactions catalyzed with wild-type ketoreductase enzymes. As used herein, the term “cofactor” refers to a non-protein compound that operates in combination with a ketoreductase enzyme. Cofactors suitable for use with the engineered ketoreductase enzymes described herein include, but are not limited to, NADP⁺ (nicotinamide adenine dinucleotide phosphate), NADPH (the reduced form of NADP⁺), NAD⁺ (nicotinamide adenine dinucleotide) and NADH (the reduced form of NAD⁺). Generally, the reduced form of the cofactor is added to the reaction mixture. The reduced NAD(P)H form can be optionally regenerated from the oxidized NAD(P)⁺ form using a cofactor regeneration system. The term “cofactor regeneration system” refers to a set of reactants that participate in a reaction that reduces the oxidized form of the cofactor (e.g., NADP⁺ to NADPH). Cofactors oxidized by the ketoreductase-catalyzed reduction of the keto substrate are regenerated in reduced form by the cofactor regeneration system. Cofactor regeneration systems comprise a stoichiometric reductant that is a source of reducing hydrogen equivalents and is capable of reducing the oxidized form of the cofactor. The cofactor regeneration system may further comprise a catalyst, for example an enzyme catalyst that catalyzes the reduction of the oxidized form of the cofactor by the reductant. The cofactor regeneration system may also comprise a cosubstrate such as isopropanol. Cofactor regeneration systems to regenerate NADH or NADPH from NAD⁺ or NADP⁺, respectively, are known in the art and may be used in the methods described herein.

### Experimental

[0161] Various features and embodiments of the invention are illustrated in the following representative examples, which are intended to be illustrative, and not limiting.

[0162] In the experimental disclosure below, the following abbreviations apply: ppm (parts per million); M (molar); mM (millimolar), uM and µM (micromolar); nM (nanomolar); mol (moles); gm and g (gram); mg (milligrams); ug and µg (micrograms); L and 1 (liter); ml and mL (milliliter); cm (centimeters); mm (millimeters); µm and µm (micrometers); sec. (seconds); min(s) (minute(s)); h(s) and hr(s) (hour(s)); U (units); MW (molecular weight); rpm (rotations per minute); °C (degrees Centigrade); RT (room temperature); CDS (coding sequence); DNA (deoxyribonucleic acid); RNA (ribonucleic acid); HPLC (high performance liquid chromatography); FIOPC (fold improvement over positive control); HTP (high throughput); LB (Luria broth); KPO₄ (potassium phosphate); KPO₃ (potassium phosphite); TEoA (triethanolamine); PMBS (polymyxin B sulfate); Sigma-Aldrich (Sigma-Aldrich, St. Louis, MO); Millipore (Millipore, Corp., Billerica MA); Difco (Difco Laboratories, BD Diagnostic Systems, Detroit, MI); Daicel (Daicel, West Chester, PA); Genetix (Genetix USA, Inc., Beaverton, OR); Molecular Devices (Molecular Devices, LLC, Sunnyvale, CA); Applied Biosystems (Applied Biosystems, part of Life Technologies, Corp., Grand Island, NY), Agilent (Agilent Technologies, Inc., Santa Clara, CA); Thermo Scientific (part of Thermo Fisher Scientific, Waltham, MA); Corning (Corning, Inc., Palo Alto, CA); and Bio-Rad (Bio-RadLaboratories, Hercules, CA).

[0163] The following sequences were used in the development of the present invention.

[0164] SEQ ID NO: 413:

aacggctttgccgcggccctctcacttccctgttaagtatcttcctggca
tcttccaggaaatctccgccccgttcgtaagccatttccgctcgccgcag
tcgaacgaccgagcgtagcgagtcagtgagcgaggaagcggaatatatcc
tgtatcacatattctgctgacgcaccggtgcagccttttttctcctgcca
catgaagcacttcactgacaccctcatcagtgaaccaccgctggtagcgg
tggtttttttaggcctatggccttttttttttgtgggaaacctttcgcgg
tatggtattaaagcgcccggaagagagtcaattcagggtggtgaatgtga
aaccagtaacgttatacgatgtcgcagagtatgccggtgtctcttatcag
accgtttcccgcgtggtgaaccaggccagccacgtttctgcgaaaacgcg
ggaaaaagtggaagcggcgatggcggagctgaattacattcccaaccgcg
tggcacaacaactggcgggcaaacagtcgttgctgattggcgttgccacc
tccagtctggccctgcacgcgccgtcgcaaattgtcgcggcgattaaatc
tcgcgccgatcaactgggtgccagcgtggtggtgtcgatggtagaacgaa
gcggcgtcgaagcctgtaaagcggcggtgcacaatcttctcgcgcaacgc
gtcagtgggctgatcattaactatccgctggatgaccaggatgccattgc
tgtggaagctgcctgcactaatgttccggcgttatttcttgatgtctctg
accagacacccatcaacagtattattttctcccatgaagacggtacgcga
ctgggcgtggagcatctggtcgcattgggtcaccagcaaatcgcgctgtt
agcgggcccattaagttctgtctcggcgcgtctgcgtctggctggctggc
ataaatatctcactcgcaatcaaattcagccgatagcggaacgggaaggc
gactggagtgccatgtccggttttcaacaaaccatgcaaatgctgaatga
gggcatcgtttccactgcgatgctggttgccaacgatcagatggcgctgg
gcgcaatgcgcgccattaccgagtccgggctgcgcgttggtgcggacatc
tcggtagtgggatacgacgataccgaagacagctcatgttatatcccgcc
gttaaccaccatcaaacaggattttcgcctgctggggcaaaccagcgtgg
accgcttgctgcaactctctcagggccaggcggttaagggcaatcagctg
ttgcccgtctcactggtgaaaagaaaaaccaccctggcgcccaatacgca
aaccgcctctccccgcgcgttggccgattcattaatgcagctggcacgac
aggtttcccgactggaaagcgggcagtgagcggtacccgataaaagcggc
ttcctgacaggaggccgttttgtttctcgagttaattaaggcagtgagcg
caacgcaattaatgtgagttagctcactcattaggcaccccaggctttac
actttatgcttccggctcgtatgttgtgtggaattgtgagcggataacaa
tttcacacaggaaacggctatgaccatgattacggattcactggccgtcg
ttttacaatctagaggccagcctggccataaggagatatacatatgagta
ttcaacatttccgtgtcgcccttattcccttttctgcggcattttgcctt
cctgtttttgctcacccagaaacgctggtgaaagtaaaagatgctgaaga
tcagttgggtgcacgagtgggttacatcgaactggatctcaacagcggta
agatccttgagagttttcgccccgaagagcgttttccaatgatgagcact
tttaaagttctgctatgtggcgcggtattatcccgtgttgacgccgggca
agagcaactcggtcgccgcatacactattctcagaatgacttggttgagt
actcaccagtcacagaaaagcatcttacggatggcatgacagtaagagaa
ttatgcagtgctgccataaccatgagtgataacactgcggccaacttact
tctgacaacgatcggaggaccgaaggagctaaccgtttttttgcacacca
tgggggatcatgtaactcgccttgatcgttgggaaccggagctgaatgaa
gccataccaaacgacgagcgtgacaccacgatgcctacagcaatggcaac
aacgttgcgcaaactattaactggcgaactacttactctagcttcccggc
aacaattaatagactggatggaggcggataaagttgcaggaccacttctg
cgctcggcccttccggctggctggtttattgctgataaatctggagccgg
tgagcgtgggtctcgcggtatcattgcagcactggggccagatggtaagc
cctcccgtatcgtagttatctacacgacggggagtcaggcaactatggat
gaacgtaatagacagatcgctgagataggtgcctcactgattaagcattg
gggccaaactggccaccatcaccatcaccattagggaagagcagatgggc
aagcttgacctgtgaagtgaaaaatggcgcacattgtgcgacattttttt
ttgaattctacgtaaaaagcagccgatacatcggctgctttttttttctg
cagggtgaaacaaaacggttgaccacatgaagtaaacacggtacggtgcg
gtagtttatcacagttaaattgctaacgcagtcaggcaaagtccatgggt
tttctttccggtaagcgcattctggtaaccggtgttgccagcaaactatc
catcgcctacggtatcgctcaggcgatgcaccgcgaaggagctgaactgg
cattcacctaccagaacgacaaactgaaaggccgcgtagaagaatttgcc
gctcaattgggttctgacatcgttctgcagtgcgatgttgcagaagatgc
cagcatcgacaccatgttcgctgaactggggaaagtttggccgaaatttg
acggttttgtacactctattgtttttgcacctggcgatcagctggatggt
gactatgttaacgccgttacccgtgaaggcttcaaaattgcccacgacat
cagctcctacagcttcgttgcaatggcaaaagcttgccgctccatgctga
atccgggttctgccctgctgaccctttcctaccttggcgctgagcgcgct
atcccgaactacaacgttatgggtctggcaaaagcgtctctggaagcgaa
cgtgcgctatatggcgaacgcgatgggtccggaaggtgtgcgtgttaacg
ccatctctgctggtccgatccgtactctggcggcctccggtatcaaagac
ttccgcaaaatgctggctcattgcgaagccgttaccccgattcgccgtac
cgttactattgaagatgtgggtaactctgcggcattcctgtgctccgatc
tctctgccggtatctccggtgaagtggtccacgttgacggcggtttcagc
attgctgcaatgaacgaactcgaactgaaataactgcaggagctcaaaca
gcagcctgtattcaggctgctttttagaaatattttatctgattaataag
atgatcttcttgagatcgttttggtctgcgcgtattctcttgctctgaaa
acgaaaaaaccgccttgcagggcggtttttcgaaggttctctgagctacc
aactctttgaaccgaggtaactggcttggaggagcgcagtcaccaaaact
tgtcctttcagtttagccttaaccggcgcatgacttcaagactaactcct
ctaaatcaattaccagtggctgctgccagtggtgcttttgcatgtctttc
cgggttggactcaagacgatagttaccggataaggcgcagcggtcggact
gaacggggggttcgtgcatacagtccagcttggagcgaactgcctacccg
gaactgagtgtcaggcgtggaatgagacaaacgcggccataacagcggaa
tgacaccggtaaaccgaaaggcaggaacaggagagcgcacgagggagccg
ccagggggaaacgcctggtatctttatagtcctgtcgggtttcgccacca
ctgatttgagcgtcagatttcgtgatgcttgtcaggggggcggagcctat
ggaaa (SEQ ID NO: 413)

[0165] SEQ ID NO: 414:

aacggctttgccgcggccctctcacttccctgttaagtatcttcctggca
tcttccaggaaatctccgccccgttcgtaagccatttccgctcgccgcag
tcgaacgaccgagcgtagcgagtcagtgagcgaggaagcggaatatatcc
tgtatcacatattctgctgacgcaccggtgcagccttttttctcctgcca
catgaagcacttcactgacaccctcatcagtgaaccaccgctggtagcgg
tggtttttttaggcctatggccttttttttttgtgggaaacctttcgcgg
tatggtattaaagcgcccggaagagagtcaattcagggtggtgaatgtga
aaccagtaacgttatacgatgtcgcagagtatgccggtgtctcttatcag
accgtttcccgcgtggtgaaccaggccagccacgtttctgcgaaaacgcg
ggaaaaagtggaagcggcgatggcggagctgaattacattcccaaccgcg
tggcacaacaactggcgggcaaacagtcgttgctgattggcgttgccacc
tccagtctggccctgcacgcgccgtcgcaaattgtcgcggcgattaaatc
tcgcgccgatcaactgggtgccagcgtggtggtgtcgatggtagaacgaa
gcggcgtcgaagcctgtaaagcggcggtgcacaatcttctcgcgcaacgc
gtcagtgggctgatcattaactatccgctggatgaccaggatgccattgc
tgtggaagctgcctgcactaatgttccggcgttatttcttgatgtctctg
accagacacccatcaacagtattattttctcccatgaagacggtacgcga
ctgggcgtggagcatctggtcgcattgggtcaccagcaaatcgcgctgtt
agcgggcccattaagttctgtctcggcgcgtctgcgtctggctggctggc
ataaatatctcactcgcaatcaaattcagccgatagcggaacgggaaggc
gactggagtgccatgtccggttttcaacaaaccatgcaaatgctgaatga
gggcatcgtttccactgcgatgctggttgccaacgatcagatggcgctgg
gcgcaatgcgcgccattaccgagtccgggctgcgcgttggtgcggacatc
tcggtagtgggatacgacgataccgaagacagctcatgttatatcccgcc
gttaaccaccatcaaacaggattttcgcctgctggggcaaaccagcgtgg
accgcttgctgcaactctctcagggccaggcggttaagggcaatcagctg
ttgcccgtctcactggtgaaaagaaaaaccaccctggcgcccaatacgca
aaccgcctctccccgcgcgttggccgattcattaatgcagctggcacgac
aggtttcccgactggaaagcgggcagtgagcggtacccgataaaagcggc
ttcctgacaggaggccgttttgtttctcgagttaattaaggcagtgagcg
caacgcaattaatgtgagttagctcactcattaggcaccccaggctttac
actttatgcttccggctcgtatgttgtgtggaattgtgagcggataacaa
tttcacacaggaaacggctatgaccatgattacggattcactggccgtcg
ttttacaatctagaggccagcctggccataaggagatatacatatgagta
ttcaacatttccgtgtcgcccttattcccttttctgcggcattttgcctt
cctgtttttgctcacccagaaacgctggtgaaagtaaaagatgctgaaga
tcagttgggtgcacgagtgggttacatcgaactggatctcaacagcggta
agatccttgagagttttcgccccgaagagcgttttccaatgatgagcact
tttaaagttctgctatgtggcgcggtattatcccgtgttgacgccgggca
agagcaactcggtcgccgcatacactattctcagaatgacttggttgagt
actcaccagtcacagaaaagcatcttacggatggcatgacagtaagagaa
ttatgcagtgctgccataaccatgagtgataacactgcggccaacttact
tctgacaacgatcggaggaccgaaggagctaaccgtttttttgcacacca
tgggggatcatgtaactcgccttgatcgttgggaaccggagctgaatgaa
gccataccaaacgacgagcgtgacaccacgatgcctacagcaatggcaac
aacgttgcgcaaactattaactggcgaactacttactctagcttcccggc
aacaattaatagactggatggaggcggataaagttgcaggaccacttctg
cgctcggcccttccggctggctggtttattgctgataaatctggagccgg
tgagcgtgggtctcgcggtatcattgcagcactggggccagatggtaagc
cctcccgtatcgtagttatctacacgacggggagtcaggcaactatggat
gaacgtaatagacagatcgctgagataggtgcctcactgattaagcattg
gggccaaactggccaccatcaccatcaccattagggaagagcagatgggc
aagcttgacctgtgaagtgaaaaatggcgcacattgtgcgacattttttt
ttgaattctacgtaaaaagcagccgatacatcggctgctttttttttctg
cagggtgaaacaaaacggttgactacatgaagtaaacacggtacggtgcg
gtagtttatcacagttaaattgctaacgcagtcaggcaaagtccatgggt
tttctttccggtaagcgcattctggtaaccggtgttgccagcaaactatc
catcgcctacggtatcgctcaggcgatgcaccgcgaaggagctgaactgg
cattcacctaccagaacgacaaactgaaaggccgcgtagaagaatttgcc
gctcaattgggttctgacatcgttctgcagtgcgatgttgcagaagatgc
cagcatcgacaccatgttcgctgaactggggaaagtttggccgaaatttg
acggttttgtacactctattgtttttgcacctggcgatcagctggatggt
gactatgttaacgccgttacccgtgaaggcttcaaaattgcccacgacat
cagctcctacagcttcgttgcaatggcaaaagcttgccgctccatgctga
atccgggttctgccctgctgaccctttcctaccttggcgctgagcgcgct
atcccgaactacaacgttatgggtctggcaaaagcgtctctggaagcgaa
cgtgcgctatatggcgaacgcgatgggtccggaaggtgtgcgtgttaacg
ccatctctgctggtccgatccgtactctggcggcctccggtatcaaagac
ttccgcaaaatgctggctcattgcgaagccgttaccccgattcgccgtac
cgttactattgaagatgtgggtaactctgcggcattcctgtgctccgatc
tctctgccggtatctccggtgaagtggtccacgttgacggcggtttcagc
attgctgcaatgaacgaactcgaactgaaataactgcaggagctcaaaca
gcagcctgtattcaggctgctttttagaaatattttatctgattaataag
atgatcttcttgagatcgttttggtctgcgcgtaatctcttgctctgaaa
acgaaaaaaccgccttgcagggcggtttttcgaaggttctctgagctacc
aactctttgaaccgaggtaactggcttggaggagcgcagtcaccaaaact
tgtcctttcagtttagccttaaccggcgcatgacttcaagactaactcct
ctaaatcaattaccagtggctgctgccagtggtgcttttgcatgtctttc
cgggttggactcaagacgatagttaccggataaggcgcagcggtcggact
gaacggggggttcgtgcatacagtccagcttggagcgaactgcctacccg
gaactgagtgtcaggcgtggaatgagacaaacgcggccataacagcggaa
tgacaccggtaaaccgaaaggcaggaacaggagagcgcacgagggagccg
ccagggggaaacgcctggtatctttatagtcctgtcgggtttcgccacca
ctgatttgagcgtcagatttcgtgatgcttgtcaggggggcggagcctat
ggaaa (SEQ ID NO: 414)

### Example 1

### E. Coli Expression Hosts Containing Recombinant KRED Genes

[0166] The initial KRED enzymes used to produce the variants of the present invention were obtained from Codexis’s collection of commercially available KRED enzyme panels. During the initial screen, the variant of SEQ ID NO: 4 produced the most product as determined by LC/MS. The KRED-encoding genes were cloned into an expression vector system, including pCK110900 (See, FIG. 3 of U.S. Pat. Appln. Publn. No. 2006/0195947), SEQ ID NO: 413, or SEQ ID NO: 414, operatively linked to the lac promoter under control of the lacl repressor. The expression vector system also contains the P15a origin of replication and a chloramphenicol resistance gene. It is not intended that the present invention be limited to the expression vectors disclosed herein. Those of skill in the art will recognize that any suitable expression vector may be used in the present invention, including, but not limited to p3xFLAGTM™ expression vectors (Sigma-Aldrich), the pBluescriptII SK(-) and pBK-CMV vectors (Stratagene), and plasmids derived from pBR322 (Gibco BRL), pUC (Gibco BRL), pREP4, pCEP4 (Invitrogen) or pPoly (See, Lathe et al., Gene 57:193-201 [1987]).

[0167] The resulting plasmids were transformed into E. coli W3110, using standard methods known in the art. The transformants were isolated by subjecting the cells to chloramphenicol selection, as known in the art (See e.g., U.S. Pat. No. 8,383,346 and WO2010/144103).

### Example 2

### Preparation of HTP KRED-Containing Wet Cell Pellets

[0168] E. coli cells containing recombinant KRED-encoding genes from monoclonal colonies were inoculated into 190 µl LB containing 1% glucose and 30 µg/mL chloramphenicol in the wells of 96-well shallow-well microtiter plates. The plates were sealed with O2-permeable seals, and cultures were grown overnight at 20° C., 200 rpm, and 85% humidity. Then, 20 µl of each of the cell cultures were transferred into the wells of 96-well deep-well plates containing 380 µL TB and 30 µg/mL CAM. The deep-well plates were sealed with O2-permeable seals and incubated at 30° C., 250 rpm, and 85% humidity until an OD600 of 0.6-0.8 was reached. The cell cultures were then induced by IPTG to a final concentration of 1 mM and incubated overnight under the same conditions as originally used. The cells were then pelleted using centrifugation at 4° C., 4000 rpm for 10 min. The supernatants were discarded, and the pellets frozen at -80° C. prior to lysis.

### Example 3

### Preparation of HTP KRED-Containing Cell Lysates

[0169] First, the cell pellets that were produced as described in Example 2 were lysed by adding 150 µL lysis buffer containing 100 mM pH 8 triethanolamine∗H₂SO₄ with 2 mM MgSO₄ or 100 mM pH 8 Potassium Phosphate with 2 mM MgSO₄, 1 g/L lysozyme, and 0.5 g/L PMBS. Then, the cell pellets were shaken at room temperature for 2 hours on a bench top shaker. The plates were centrifuged at 4000 rpm, for 15 minutes at 4° C. to remove cell debris. The supernatants were then used in biocatalytic reactions to determine their activity levels.

### Example 4

### Preparation of Lyophilized Lysates From Shake Flask (SF) Cultures

[0170] Shake-flask procedures can be used to generate engineered KRED polypeptide shake-flask powders (SFP), which are useful for secondary screening assays and/or use in the biocatalytic processes described herein. Shake flask powder (SFP) preparation of enzymes provides a more purified preparation (e.g., up to 30% of total protein) of the engineered enzyme, as compared to the cell lysate used in HTP assays and also allows for the use of more concentrated enzyme solutions. To start this, selected HTP cultures grown as described above were plated onto LB agar plates with 1% glucose and 30 µg/ml chloramphenicol (CAM), and grown overnight at 37° C. A single colony from each culture was transferred to 6 ml of LB with 1% glucose and 30 µg/ml CAM. The cultures were grown for 18 h at 30° C. at 250 rpm, and subcultured approximately 1:50 into 250 ml of TB containing 30 µg/ml CAM, to a final OD₆₀₀ of 0.05. The cultures were grown for approximately 3 hours at 30° C. at 250 rpm to an OD₆₀₀ between 0.8-1.0 and induced with 1 mM IPTG. The cultures were then grown for 20 h at 30° C. at 250 rpm. The cultures were centrifuged (4000 rpm for 20 min at 4° C.). The supernatant was discarded, and the pellets were re-suspended in 35 ml of 50 mM pH 8 Potassium Phosphate with 2 mM MgSO₄. The re-suspended cells were centrifuged (4000 rpm for 20 min at 4° C.). The supernatant was discarded, and the pellets were re-suspended in 6 ml of 50 mM pH 8 Potassium Phosphate with 2 mM MgSO₄, and the cells were lysed using a cell disruptor from Constant Systems (One Shot). The lysates were pelleted (10,000 rpm for 60 min at 4° C.), and the supernatants were frozen and lyophilized to generate shake flake (SF) enzymes.

### Example 5

### Evolution and Screening of Engineered Polypeptides Derived From SEQ ID NO: 4 for Improved KRED Activity

[0171] SEQ ID NO: 4 was selected as the parent enzyme based on the results of screening variants for the reduction of the iso-α-acid substrate. Libraries of engineered genes were produced using well-established techniques (e.g., saturation mutagenesis, and recombination of previously identified beneficial mutations). The polypeptides encoded by each gene were produced in HTP as described in Example 2, and the soluble lysate was generated as described in Example 3.

[0172] The engineered polynucleotide encoding the polypeptide having KRED activity of SEQ ID NO: 4 (i.e., SEQ ID NO: 3), was used to generate the further engineered polypeptides of Table 5-1. These polypeptides displayed improved formation of dihydro-(rho)-iso-α-acids from iso-α-acids as compared to the starting polypeptide. The engineered polypeptides were generated from the “backbone” amino acid sequence of SEQ ID NO: 4 using directed evolution methods as described above together with the HTP assay and analytical methods described below in Table 5-2.

[0173] Directed evolution began with the polynucleotide set forth in SEQ ID NO: 3. Engineered polypeptides were then selected as starting “backbone” gene sequences. Libraries of engineered polypeptides were generated using various well-known techniques (e.g., saturation mutagenesis, recombination of previously identified beneficial amino acid differences) and screened using HTP assay and analysis methods that measured the polypeptides’ ability to convert the iso-α-acid substrates to the desired dihydro-(rho)-iso-α-acid product.

[0174] The enzyme assay was carried out in a 96-well format, in 200 µL total volume/well, which included 50% v/v HTP enzyme lysate, 8 g/L iso-α-acid substrate (Isolone® Isomerized Hop Extract Solution, Kalsec), and 0.1 g/L NADP in 40 vol% isopropanol (IPA) in 100 mM pH 8 triethanolamine∗H₂SO₄ with 2 mM MgSO₄. The plates were sealed and incubated at 40° C. with shaking at 600 rpm for 20-24 hours.

[0175] After 20-24 hours, 1000 µL of acetonitrile with 0.1% acetic acid was added. The plates were sealed and centrifuged at 4000 rpm at 4° C. for 10 min. The quenched sample was further diluted 4-5x in 50:50 acetonitrile:water mixture prior to HPLC analysis. The HPLC run parameters are described below in Table 5-2.

TABLE 5-1

KRED Variant Activity Relative to SEQ ID NO: 4

| SEQ ID NO: (nt/aa) | Amino Acid Differences (Relative to SEQ ID NO: 4) | Percent Conversion Fold Improvement (Relative to SEQ ID NO: 4)¹ |
|---|---|---|
| 5/6 | L196K | ++++ |
| ⅞ | L196R | +++ |
| 9/10 | L153R | +++ |
| 11/12 | L145S | +++ |
| 13/14 | T152G | ++ |
| 15/16 | L196H | ++ |
| 17/18 | I93V | ++ |
| 19/20 | L145M | ++ |
| 21/22 | L145G | ++ |
| 23/24 | L145C | + |
| 25/26 | L153V | + |
| 27/28 | D197R | + |
| 29/30 | L21R | + |
| 31/32 | I93D | + |
| 33/34 | V148I | + |
| 35/36 | L153C | + |
| 37/38 | E200Q | + |
| 39/40 | P194R | + |
| 41/42 | E200R | + |
| 43/44 | M206V | + |
| 45/46 | I93M | + |
| 47/48 | D197G | + |
| 49/50 | P194N | + |
| 51/52 | E200L | + |
| 53/54 | L110I | + |
| 55/56 | I226L | + |
| 57/58 | I93T | + |
| 59/60 | T212S | + |
| 61/62 | P194H | + |
| 63/64 | T152S | + |
| 65/66 | V12I | + |
| 67/68 | K97G | + |
| 69/70 | V87L | + |

¹Levels of increased activity were determined relative to the reference polypeptide of SEQ ID NO: 4 and defined as follows: “+” >1.0 but < 2.0, “++” ≥2 but ≤ 4, “+++” ≥ 4 but ≤ 8, “++++” ≥ 8

TABLE 5-2

HPLC Parameters

| Instrument | Agilent 1100 HPLC | | |
|---|---|---|---|
| Column | 30 × 50 mm 2.7 µm Waters XBridge Phenyl column | | |
| Mobile Phase | A: 0.1% acetic acid in water, B: 0.1% acetic acid in acetonitrile | | |
| Run parameters | 42:58 A/B for 1 minute; ramp to 10:90 A/B over 1 minute | | |
| Flow Rate | 1.5 mL/min | | |
| Run time | 2.0 min | | |
| | Compound | retention time [min] | note |
| Peak Retention Times | Iso-1 | 0.6 | mixture of co-Iso isomers |
| | Iso-2 | 0.7 | mixture of n/ad-Iso isomers |
| | Iso-3 | 0.8 | mixture of n/ad-Iso isomers |
| | Rho-1 | 1.0 | mixture of co-Rho isomers |
| | Rho-2 | 1.2 | mixture of n/ad-Rho isomers |
| | Rho-3 | 1.4 | mixture of n/ad-Rho isomers |
| Column Temperature | 50° C. | | |
| Injection Volume | 10 µL | | |
| Detection | 260 nm | | |

### Example 6

### Evolution and Screening of Engineered Polypeptides Derived From SEQ ID NO: 6 for Improved KRED Activity

[0176] Libraries of engineered genes were produced using well-established techniques (e.g., saturation mutagenesis, and recombination of previously identified beneficial mutations). The polypeptides encoded by each gene were produced in HTP as described in Example 2, and the soluble lysate was generated as described in Example 3.

[0177] The engineered polynucleotide encoding the polypeptide having KRED activity of SEQ ID NO: 6 (i.e., SEQ ID NO: 5), was used to generate the further engineered polypeptides of Table 6-1. These polypeptides displayed improved formation of dihydro-(rho)-iso-α-acids from iso-α-acids as compared to the starting polypeptide. The engineered polypeptides were generated from the “backbone” amino acid sequence of SEQ ID NO: 6 using directed evolution methods as described above together with the HTP assay and analytical methods described below in Table 5-2.

[0178] Directed evolution began with the polynucleotide set forth in SEQ ID NO: 5. Engineered polypeptides were then selected as starting “backbone” gene sequences. Libraries of engineered polypeptides were generated using various well-known techniques (e.g., saturation mutagenesis, recombination of previously identified beneficial amino acid differences) and screened using HTP assay and analysis methods that measured the polypeptides’ ability to convert the iso-α-acid substrates to the desired dihydro-(rho)-iso-α-acid product.

[0179] The enzyme assay was carried out in a 96-well format, in 200 µL total volume/well, which included 50% v/v HTP enzyme lysate, 16 or 40 g/L of iso-α-acid substrate (Isolone® Isomerized Hop Extract Solution, Kalsec), and 0.1 g/L NADP in 40 vol% isopropanol (IPA) in 100 mM pH 8 triethanolamine∗H₂SO₄ with 2 mM MgSO₄. The plates were sealed and incubated at 40° C. with shaking at 600 rpm for 20-24 hours.

[0180] After 20-24 hours, 1000 µL of acetonitrile with 0.1% acetic acid was added. The plates were sealed and centrifuged at 4000 rpm at 4° C. for 10 min. The quenched sample was further diluted 10-20x in 50:50 acetonitrile:water mixture prior to HPLC analysis. The HPLC run parameters are described in Table 5-2.

TABLE 6-1

KRED Variant Activity Relative to SEQ ID NO: 6

| SEQ ID NO: (nt/aa) | Amino Acid Differences (Relative to SEQ ID NO: 6) | Percent Conversion Fold Improvement (Relative to SEQ ID NO: 6)¹ |
|---|---|---|
| 71/72 | V12I;L145M | ++++ |
| 73/74 | L145M | +++ |
| 75/76 | V87L;L110I;L145M | +++ |
| 77/78 | L145M;T152G | +++ |
| 79/80 | V87L;L110I;L145M | +++ |
| 81/82 | V12I;L110I;L145M;T152G | ++ |
| 83/84 | L110I;L145M;P194H | ++ |
| 85/86 | L110I;L145M;T152G;D197G | + |
| 87/88 | V87L;L110I;L145M;P194N | + |
| 89/90 | V87L;L110I;L145M;P194H | + |
| 91/92 | T152S | + |
| 93/94 | L145M;D197G;I226L | + |
| 95/96 | V87L;L145M;P194H | + |
| 97/98 | L110I | + |

¹Levels of increased activity were determined relative to the reference polypeptide of SEQ ID NO: 6 and defined as follows: “+” >1.0 but < 2.0, “++” ≥2 but ≤ 4, “+++” ≥ 4 but ≤ 8, “++++” ≥ 8

### Example 7

### Evolution and Screening of Engineered Polypeptides Derived From SEQ ID NO: 80 for Improved KRED Activity

[0181] Libraries of engineered genes were produced using well-established techniques (e.g., saturation mutagenesis, and recombination of previously identified beneficial mutations). The polypeptides encoded by each gene were produced in HTP as described in Example 2, and the soluble lysate was generated as described in Example 3.

[0182] The engineered polynucleotide encoding the polypeptide having KRED activity of SEQ ID NO: 80 (i.e., SEQ ID NO: 79), was used to generate the further engineered polypeptides of Table 7-1. These polypeptides displayed improved formation of dihydro-(rho)-iso-α-acids from iso-α-acids as compared to the starting polypeptide. The engineered polypeptides were generated from the “backbone” amino acid sequence of SEQ ID NO: 80 using directed evolution methods as described above, together with the HTP assay and analytical methods described below in Table 5-2.

[0183] Directed evolution began with the polynucleotide set forth in SEQ ID NO: 79. Engineered polypeptides were then selected as starting “backbone” gene sequences. Libraries of engineered polypeptides were generated using various well-known techniques (e.g., saturation mutagenesis, recombination of previously identified beneficial amino acid differences) and screened using HTP assay and analysis methods that measured the polypeptides’ ability to convert the iso-α-acid substrates to the desired dihydro-(rho)-iso-α-acid product.

[0184] The enzyme assay was carried out in a 96-well format, in 200 µL total volume/well, which included 25% v/v HTP enzyme lysate, 60 or 80 g/L of iso-α-acid substrate (Isolone® Isomerized Hop Extract Solution, Kalsec), and 0.02 g/L NADP in 40 vol% isopropanol (IPA) in 100 mM pH 8 potassium phosphate with 2 mM MgSO₄. The plates were sealed and incubated at 45° C. with shaking at 600 rpm for 20-24 hours.

[0185] After 20-24 hours, 1000 µL of acetonitrile with 0.1% acetic acid was added. The plates were sealed and centrifuged at 4000 rpm at 4° C. for 10 min. The quenched sample was further diluted 20-40x in 50:50 acetonitrile:water mixture prior to HPLC analysis. The HPLC run parameters are described in Table 5-2.

TABLE 7-1

KRED Variant Activity Relative to SEQ ID NO: 80

| SEQ ID NO: (nt/aa) | Amino Acid Differences (Relative to SEQ ID NO: 80) | Percent Conversion Fold Improvement (Relative to SEQ ID NO: 80)¹ |
|---|---|---|
| 99/100 | L211R | ++++ |
| 101/102 | L17S | ++++ |
| 103/104 | L17Q | +++ |
| 105/106 | D198A | +++ |
| 107/108 | T152K | +++ |
| 109/110 | D101T | +++ |
| 111/112 | I110V | +++ |
| 113/114 | D101C | ++ |
| 115/116 | P190A | ++ |
| 117/118 | V56C | ++ |
| 119/120 | A162G | ++ |
| 121/122 | V95I | ++ |
| 123/124 | T210W | ++ |
| 125/126 | T210F | ++ |
| 127/128 | L21A | ++ |
| 129/130 | C227V | + |
| 131/132 | K46V | + |
| 133/134 | D101L | + |
| 135/136 | D198Q | + |
| 137/138 | T152L | + |
| 139/140 | E79L | + |
| 141/142 | K72A | + |

¹Levels of increased activity were determined relative to the reference polypeptide of SEQ ID NO: 80 and defined as follows: “+” >1.0 but < 2.0, “++” ≥2 but ≤ 4, “+++” ≥ 4 but ≤ 8, “++++” ≥ 8

### Example 8

### Evolution and Screening of Engineered Polypeptides Derived From SEQ ID NO: 80 for Improved KRED Activity

[0186] Libraries of engineered genes were produced using well-established techniques (e.g., saturation mutagenesis, and recombination of previously identified beneficial mutations). The polypeptides encoded by each gene were produced in HTP as described in Example 2, and the soluble lysate was generated as described in Example 3.

[0187] The engineered polynucleotide encoding the polypeptide having KRED activity of SEQ ID NO: 80 (i.e., SEQ ID NO: 79), was used to generate the further engineered polypeptides of Table 8-1. These polypeptides displayed improved formation of dihydro-(rho)-iso-α-acids from iso-α-acids as compared to the starting polypeptide. The engineered polypeptides were generated from the “backbone” amino acid sequence of SEQ ID NO: 80 using directed evolution methods as described above together with the HTP assay and analytical methods described below in Table 5-2.

[0188] Directed evolution began with the polynucleotide set forth in SEQ ID NO: 79. Engineered polypeptides were then selected as starting “backbone” gene sequences. Libraries of engineered polypeptides were generated using various well-known techniques (e.g., saturation mutagenesis, recombination of previously identified beneficial amino acid differences) and screened using HTP assay and analysis methods that measured the polypeptides’ ability to convert the iso-α-acid substrates to the desired dihydro-(rho)-iso-α-acids products.

[0189] The enzyme assay was carried out in a 96-well format, in 200 µL total volume/well, which included 10-20% v/v HTP enzyme lysate, 80 or 160 g/L of iso-α-acid substrate (Isolone® Isomerized Hop Extract Solution, Kalsec), and 0.02 g/L NADP in 40 vol% isopropanol (IPA) in 100 mM pH 8 potassium phosphate with 2 mM MgSO₄. The plates were sealed and incubated at 45° C. with shaking at 600 rpm for 20-24 hours.

[0190] After 20-24 hours, 1000 µL of acetonitrile with 0.1% acetic acid was added. The plates were sealed and centrifuged at 4000 rpm at 4° C. for 10 min. The quenched sample was further diluted 20-40x in 50:50 acetonitrile:water mixture prior to HPLC analysis. The HPLC run parameters are described in Table 5-2.

TABLE 8-1

KRED Variant Activity Relative to SEQ ID NO: 80

| SEQ ID NO: (nt/aa) | Amino Acid Differences (Relative to SEQ ID NO: 80) | Percent Conversion Fold Improvement (Relative to SEQ ID NO: 80)¹ |
|---|---|---|
| 143/144 | P190A;P194E | ++++ |
| 145/146 | P194E | ++++ |
| 147/148 | N157C | ++++ |
| 149/150 | L17M | ++++ |
| 99/100 | L211R | ++++ |
| 151/152 | L17S | +++ |
| 153/154 | I191T;P194E | +++ |
| 155/156 | P190A;I191T;P194E | +++ |
| 103/104 | L17Q | ++ |
| 157/158 | S159T | ++ |
| 159/160 | D198Q | ++ |
| 139/140 | E79L | + |
| 161/162 | D198A | + |

¹Levels of increased activity were determined relative to the reference polypeptide of SEQ ID NO: 80 and defined as follows: “+” >1.0 but < 2.0, “++” ≥2 but ≤ 4, “+++” ≥ 4 but ≤ 8, “++++” ≥ 8

### Example 9

### Evolution and Screening of Engineered Polypeptides Derived From SEQ ID NO: 6 and SEQ ID NO: 80 for Improved KRED Activity at High Substrate Concentration

[0191] A 40 g/L enzyme stock solution was prepared by dissolving 200 mg of enzyme powder in 5 mL of 100 mM pH 8 triethanolamine∗H₂SO₄ with 2 mM MgSO₄. A 2 mL aliquot was taken and subjected to two successive 1:1 v/v dilution to each 20 and 10 g/L. 500 µL of enzyme stock solution (10, 20 or 40 g/L) were added to a vial under air with stir bar. To the stirred enzyme stock solution was added a 100 µL aliquot of 1 g/L NADP in buffer and 400 µL of 25 g/L iso-α-acids in isopropanol (IPA). The final reaction composition was 5, 10, or 20 g/L enzyme, 10 g/L iso-α-acids, and 0.1 g/L NADP in 40% IPA. The vial was placed in a heating block at 25° C. or 40° C. and sampled after 1, 2, 4, 8, and 24 h and analyzed by HPLC-UV. A typical reaction profile comparing SEQ ID NO: 6 and SEQ ID NO: 80 is shown in FIG. 1.

### Example 10

### Evolution and Screening of Engineered Polypeptides Derived From SEQ ID NO: 80, 104, 100, 136,116,132,162,150,152,144 and 146 for Improved KRED Activity at High Substrate and Low NADP Concentration

[0192] A 200 g/L enzyme stock solution was prepared by dissolving 100 mg of enzyme powder in 500 µL of 100 mM pH 8 potassium phosphate buffer with 2 mM MgSO₄ and 0.1 g/L of NADP. To a well in a 96 deep-well plate were added 40 µL of the enzyme/NADP stock solution, 80 µL of isopropanol, and 80 µL of 40 wt% aqueous solution of iso-α-acids. The final reaction composition was 40 g/L of enzyme, 160 g/L iso-α-acids, and 0.02 g/L NADP in 40% IPA. The plate was sealed and incubated at 40° C. for 24 h and then quenched and analyzed by HPLC-UV. The data are shown in Table 11-1 and depicted in FIG. 2.

TABLE 10-1

KRED Activity at High Substrate and Low NADPH Concentration

| SEQ ID NO: (nt/aa) | % Conversion | | | | | |
|---|---|---|---|---|---|---|
| | 40 g/L | 20 g/L | 10 g/L | 5 g/L | 2.5 g/L | 1.25 g/L |
| 79/80 | 4.2 | 1.9 | 0.9 | 0.5 | 0.1 | 0.0 |
| 103/104 | 28.2 | 16.5 | 8.7 | 5.2 | 2.2 | 1.2 |
| 99/100 | 23.1 | 11.2 | 6.1 | 3.3 | 1.3 | 0.6 |
| 135/136 | 23.6 | 7.5 | 2.4 | 1.2 | 0.6 | 0.0 |
| 115/116 | 8.5 | 3.2 | 1.2 | 0.7 | 0.2 | 0.0 |
| 131/132 | 5.3 | 2.2 | 0.8 | 0.4 | 0.1 | 0.0 |
| 161/162 | 29.1 | 14.4 | 5.6 | 2.1 | 0.7 | 0.3 |
| 149/150 | 29.0 | 14.9 | 6.0 | 2.4 | 1.0 | 0.2 |
| 151/152 | 30.6 | 17.9 | 7.4 | 3.6 | 2.0 | 1.2 |
| 143/144 | 29.1 | 14.4 | 5.8 | 2.4 | 1.2 | 0.4 |
| 145/146 | 24.3 | 12.3 | 4.7 | 1.9 | 0.8 | 0.1 |
| 157/158 | 3.0 | 1.1 | 0.4 | 0.0 | 0.0 | 0.0 |

### Example 11

### Evolution and Screening of Engineered Polypeptides Derived From SEQ ID NO: 104 for Improved KRED Activity

[0193] As described in Example 8, libraries of engineered genes were produced using well-established techniques (e.g., saturation mutagenesis, and recombination of previously identified beneficial mutations). The polypeptides encoded by each gene were produced in HTP as described in Example 2, and the soluble lysate was generated as described in Example 3.

[0194] The engineered polynucleotide encoding the polypeptide having KRED activity of SEQ ID NO: 104 (i.e., SEQ ID NO: 103), was used to generate the further improved, engineered polypeptides of Table 11-1.

TABLE 11-1

KRED Variant Product Conversion Relative to SEQ ID NO: 104

| SEQ ID NO: (nt/aa) | Amino Acid Differences (Relative to SEQ ID NO: 104) | Percent Conversion Fold Improvement (Relative to SEQ ID NO: 104)¹ |
|---|---|---|
| 163/164 | Q17M/P190A/D198A | + |
| 165/166 | Q17M/K46V/D 198A/L211R | + |
| 167/168 | K46V/P194E/D198Q | + |
| 169/170 | Q17M/K46V/P190A | + |
| 171/172 | Q17M/P190A/D198Q | ++ |
| 173/174 | K46V/P190A/P194E/D 198Q | + |
| 175/176 | Q17M/I96V/P194E/D198Q | + |

¹levels of increased conversion were determined relative to the reference polypeptide of SEQ ID NO: 104 and defined as follows: “+” ≥ 4.0, “++” ≥8.0

### Example 12

### E. Coli Expression Hosts Containing Recombinant KRED Genes

[0195] The initial KRED enzymes used to produce the variants of the present invention were obtained from Codexis’s collection of commercially available KRED enzyme panels. During the initial screen, the polypeptide of SEQ ID NO: 172 or polypeptide of SEQ ID NO: 270 produced the most product as determined by LC/MS. The KRED-encoding genes were cloned into the expression vector of SEQ ID NO: 413 or SEQ ID NO: 414, operatively linked to the lac promoter under control of the lacl repressor. The expression vector also contains the P15a origin of replication and a chloramphenicol resistance gene. The resulting plasmids were transformed into E. coli W3110, using standard methods known in the art. The transformants were isolated by subjecting the cells to triclosan selection, as known in the art (See e.g., U.S. Pat. No. 8,383,346 and WO2010/144103).

### Example 13

### Preparation of HTP KRED-Containing Wet Cell Pellets

[0196] E. coli cells containing recombinant KRED-encoding genes from monoclonal colonies were inoculated into 190 µl LB containing 1% glucose and 0.12 µg/mL of triclosan in the wells of 96-well shallow-well microtiter plates. The plates were sealed with O₂-permeable seals, and cultures were grown overnight at 20° C., 200 rpm, and 85% humidity. Then, 20 µl of each of the cell cultures were transferred into the wells of 96-well deep-well plates containing 380 µL TB and 30 µg/mL CAM. The deep-well plates were sealed with O₂-permeable seals and incubated at 30° C., 250 rpm, and 85% humidity until an OD₆₀₀ of 0.6-0.8 was reached. The cell cultures were then induced by IPTG to a final concentration of 1 mM and incubated overnight under the same conditions as originally used. The cells were then pelleted using centrifugation at 4° C., 4000 rpm for 10 min. The supernatants were discarded, and the pellets were frozen at -80° C. prior to lysis.

### Example 14

### Preparation of HTP KRED-Containing Cell Lysates

[0197] First, the cell pellets that were produced as described in Example 2 were lysed by adding 150 µL lysis buffer containing 100 mM, pH 8 potassium phosphate with 2 mM MgSO₄ or 100 mM, pH 8 potassium phosphate with 2 mM MgSO₄, 1 g/L lysozyme, and 0.5 g/L PMBS. Then, the cell pellets were shaken at room temperature for 2 hours on a bench top shaker. The plates were centrifuged at 4,000 rpm, for 15 minutes at 4° C. to remove cell debris. The supernatants were then used in biocatalytic reactions to determine their activity levels.

### Example 15

### Preparation of Lyophilized Lysates From Shake Flask (SF) Cultures

[0198] Shake-flask procedures can be used to generate engineered KRED polypeptide shake-flask powders (SFP), which are useful for secondary screening assays and/or use in the biocatalytic processes described herein. Shake flask powder (SFP) preparation of enzymes provides a more purified preparation (e.g., up to 30% of total protein) of the engineered enzyme, as compared to the cell lysate used in HTP assays and also allows for the use of more concentrated enzyme solutions. To start this, selected HTP cultures grown as described above were plated onto LB agar plates with 1% glucose and 0.12 µg/mL of triclosan, and grown overnight at 37° C. A single colony from each culture was transferred to 6 ml of LB with 1% glucose and 30 µg/ml CAM. The cultures were grown for 18 h at 30° C. at 250 rpm and subcultured approximately 1:50 into 250 ml of TB containing 0.12 µg/mL of triclosan, to a final OD₆₀₀ of 0.05. The cultures were grown for approximately 3 hours at 30° C. at 250 rpm to an OD₆₀₀ between 0.8-1.0 and induced with 1 mM IPTG. The cultures were then grown for 20 h at 30° C. at 250 rpm. The cultures were centrifuged (4,000 rpm for 20 min at 4° C.). The supernatant was discarded, and the pellets were re-suspended in 35 ml of 50 mM, pH 8 potassium phosphate with 2 mM MgSO₄. The re-suspended cells were centrifuged (4,000 rpm for 20 min at 4° C.). The supernatant was discarded, and the pellets were re-suspended in 6 ml of 50 mM, pH 8 potassium phosphate with 2 mM MgSO₄, and the cells were lysed using a cell disruptor from Constant Systems (One Shot). The lysates were pelleted (10,000 rpm for 60 min at 4° C.), and the supernatants were frozen and lyophilized to generate shake flake (SF) enzymes.

### Example 16

### Evolution and Screening of Engineered Polypeptides Derived From SEQ ID NO: 172 for Improved KRED Activity

[0199] The polypeptide of SEQ ID NO: 172 was selected as the parent enzyme based on the results of screening variants for the reduction of the iso-α-acid substrate. Libraries of engineered genes were produced using well-established techniques (e.g., saturation mutagenesis, and recombination of previously identified beneficial mutations). The polypeptides encoded by each gene were produced in HTP as described in Example 2, and the soluble lysate was generated as described in Example 3.

[0200] The engineered polynucleotide encoding the polypeptide having KRED activity of SEQ ID NO: 172 was used to generate the further engineered polypeptides of Table 16-1. These polypeptides displayed improved formation of dihydro-(rho)-iso-α-acids from iso-α-acids as compared to the starting polypeptide. The engineered polypeptides were generated from the “backbone” amino acid sequence of SEQ ID NO: 172 using directed evolution methods as described above together with the HTP assay and analytical methods described below in Table 16-1.

[0201] Directed evolution began with the polynucleotide set forth in SEQ ID NO: 171. Engineered polypeptides were then selected as starting “backbone” gene sequences. Libraries of engineered polypeptides were generated using various well-known techniques (e.g., saturation mutagenesis, recombination of previously identified beneficial amino acid differences) and screened using HTP assay and analysis methods that measured the polypeptides’ ability to convert the iso-α-acid substrates to the desired dihydro-(rho)-iso-α-acid product.

[0202] The enzyme assay was carried out in a 96-deep well plate format, in 100 µL total volume/well, which included 20% v/v HTP enzyme lysate, 40% v/v of 40 wt% aqueous solution of iso-α-acid substrate (Isolone® Isomerized Hop Extract Solution, Kalsec), and 0.02 g/L NADP in 40 vol% isopropanol (IPA) in 100 mM, pH 8 potassium phosphate with 2 mM MgSO_{4.} The plates were sealed and incubated at 45° C. with shaking at 600 rpm for 20-24 hours.

[0203] After 20-24 hours, 1000 µL of acetonitrile with 0.1% acetic acid were added. The plates were sealed and centrifuged at 4,000 rpm at 4° C. for 10 min. The quenched sample was further diluted 4-5x in 50:50 acetonitrile:water mixture prior to HPLC analysis. The HPLC run parameters are below in Table 5-2.

TABLE 16-1

KRED Variant Activity Relative to SEQ ID NO:172

| SEQ ID NO: (nt/aa) | Amino Acid Differences (Relative to SEQ ID NO:172) | Percent Conversion Fold Improvement (Relative to SEQ ID NO:172)¹ |
|---|---|---|
| 177/178 | E204Q | + |
| 179/180 | I226V | + |
| 181/182 | D101Y | + |
| 183/184 | Y179M | + |
| 185/186 | D101R | ++ |
| 187/188 | A231G | + |
| 189/190 | P194E | + |
| 191/192 | E45L | + |

¹levels of increased activity were determined relative to the reference polypeptide of SEQ ID NO: 172 and defined as follows: “+” >1.0 but < 1.5, “++” ≥1.5

### Example 17

### Evolution and Screening of Engineered Polypeptides Derived From SEQ ID NO: 186 for Improved KRED Activity on Trans-ISO

[0204] SEQ ID NO: 186 was selected as the parent enzyme based on the results of screening variants for the reduction of the iso-α-acid substrate. Libraries of engineered genes were produced using well-established techniques (e.g., saturation mutagenesis, and recombination of previously identified beneficial mutations). The polypeptides encoded by each gene were produced in HTP as described in Example 2, and the soluble lysate was generated as described in Example 3.

[0205] The engineered polynucleotide encoding the polypeptide having KRED activity of SEQ ID NO: 185 was used to generate the further engineered polypeptides of Table 17-2. These polypeptides displayed improved formation of dihydro-(rho)-iso-α-acids from iso-α-acids as compared to the starting polypeptide. The engineered polypeptides were generated from the “backbone” amino acid sequence of SEQ ID NO: 186 using directed evolution methods as described above together with the HTP assay and analytical methods described in Table 5-2.

[0206] Directed evolution began with the polynucleotide set forth in SEQ ID NO: 185. Engineered polypeptides were then selected as starting “backbone” gene sequences. Libraries of engineered polypeptides were generated using various well-known techniques (e.g., saturation mutagenesis, recombination of previously identified beneficial amino acid differences) and screened using HTP assay and analysis methods that measured the polypeptides’ ability to convert the iso-α-acid substrates to the desired dihydro-(rho)-iso-α-acid product.

[0207] The enzyme assay was carried out in a 96-deep well plate format, in 100 µL total volume/well, which included 50% v/v HTP enzyme lysate, 10% v/v of 10 g/L of SEQ ID NO: 186, 1 g/L iso-α-acid substrate (Isolone® Isomerized Hop Extract Solution, Kalsec), and 0.1 g/L NADP in 40 vol% isopropanol (IPA) in 100 mM, pH 8 potassium phosphate with 2 mM MgSO₄. The plates were sealed and incubated at 30° C. with shaking at 600 rpm for 44-48 hours.

[0208] After 20-24 hours, 1000 µL of acetonitrile with 0.1% acetic acid were added. The plates were sealed and centrifuged at 4,000 rpm at 4° C. for 10 min. The quenched sample was further diluted 4-5x in 50:50 acetonitrile:water mixture prior to HPLC analysis. The HPLC run parameters are described below in Table 17-1. See FIG. 3. Variants that showed improved activity towards the Trans-ISOs are shown in Table 17-2.

TABLE 17-1

HPLC Parameters

| Instrument | Agilent 1100 HPLC | | |
|---|---|---|---|
| Column | 3 × 150 mm 2.1 µm Waters Atlantis T3 column | | |
| Mobile Phase | 30% acetonitrile in 50 mM pH 8 potassium phosphate | | |
| Flow Rate | 0.8 mL/min | | |
| Run time | 20 min | | |
| | Compound | retention time [min] | note |
| Peak Retention Times | Rho-1 | 3.4 | trans-co-Rho |
| | Rho-2 | 4.8 | cis-co-Rho |
| | Rho-3 | 5.4 | trans-n/ad-Rho |
| | Rho-4 | 7.0 | mixture of Rho isomers |
| | Rho-5 | 7.3 | mixture of Rho isomers |
| | Rho-6 | 7.7 | cis-n/ad-Rho |
| | ISO-1 | 9.0 | cis-co-ISO |
| | ISO-2 | 10.2 | trans-co-ISO |
| | Rho-7 | 12.5 | trans-n/ad-Rho |
| | ISO-3 | 15.1 | cis-n/ad-ISO |
| | ISO-4 | 17.4 | trans-n/ad-ISO |
| Column Temperature | 40° C. | | |
| Injection Volume | 10 µL | | |
| Detection | 270 nm | | |

TABLE 17-2

KRED Variant Activity Relative with improved trans-ISO activity

| SEQ ID NO: (nt/aa) | Amino Acid Differences (Relative to SEQ ID NO:186) | Activity on Trans-ISO¹ |
|---|---|---|
| 193/194 | D150A/L153A/M205A/L211A | + |
| 195/196 | D150A/L153A/L211A | + |
| 197/198 | V95A/K97A/D150A/L153A | + |
| 199/200 | V95A/D150A/L153A/M205A/L211A | + |
| 201/202 | K97A/D150A/L153A | + |
| 203/204 | M145A/L153A/L211A | + |
| 205/206 | I96A/D150A/L153A | + |
| 207/208 | K97A/D150A/L153A/M205A/L211A | + |
| 209/210 | V95A/D15OA/L153A/M205A/M206A/L211A | + |
| 211/212 | K97A/D150A/L153A/M205A | + |
| 213/214 | D150A/L153A/M206A/L211A | + |
| 215/216 | D150A/L153A/M206A/L211A | + |
| 217/218 | V95A/I96A/K97A/D150A/L153A/M205A | + |
| 219/220 | V95A/K97A/S143A/M145A/D150A/L153A/W202A/M205A | + |
| 221/222 | K97A/D150A/L153A/M206A | + |
| 223/224 | V95A/K97A/D150A/L153A/W202A/M205A/M206A | + |
| 225/226 | S143A/I144A/M145A/D150A/L153A/W202A/M205A/W249A | + |
| 227/228 | S143A/M145A/D150A/L153A | + |
| 229/230 | V95A/K97A/S143A/M145A/D150A/L153A/W249A | + |
| 231/232 | I96A/D150A/L153A/M206A | + |
| 233/234 | I144A/D150A/L153A/W202A/M205A/M206A | + |
| 235/236 | V95A/I96A/D150A/L153A/M205A/M206A/L211A/W249A | + |
| 237/238 | V95A/D150A/L153A/M206A/W249A | + |
| 239/240 | I144A/M145A/D150A/L153A/M205A/M206A | + |
| 241/242 | M145A/D150A/L153A/M206A/W249A | + |
| 243/244 | D150A/L153A/W249A | + |
| 245/246 | I144A/D150A/L153A | + |
| 247/248 | D150A/L153A/W202A/M206A/W249A | + |
| 249/250 | V95A/D150A/L153A/M206A/W249A | + |

¹ SEQ ID NO: 186 showed no detectable activity on trans-ISO

### Example 18

### Evolution and Screening of Engineered Polypeptides Derived From SEQ ID NO:186 for Improved KRED Activity

[0209] As described in Example 16, libraries of engineered genes were produced using well-established techniques (e.g., saturation mutagenesis, and recombination of previously identified beneficial mutations). The polypeptides encoded by each gene were produced in HTP as described in Example 2, and the soluble lysate was generated as described in Example 3.

[0210] The engineered polynucleotide encoding the polypeptide having KRED activity of SEQ ID NO: 186 (i.e., SEQ ID NO: 185), was used to generate the further improved, engineered polypeptides of Table 18-1.

TABLE 18-1

KRED Variant Activity Relative to SEQ ID NO:186

| SEQ ID NO: (nt/aa) | Amino Acid Differences (Relative to SEQ ID NO: SEQ ID NO:186) | Percent Conversion Fold Improvement (Relative SEQ ID NO:186)¹ |
|---|---|---|
| 251/252 | I110V/Y179M/P194E | ++ |
| 253/254 | I110V | ++ |
| 255/256 | T103R/L147I | ++ |
| 257/258 | I110V | ++ |
| 259/260 | H7Q/L147I | + |
| 261/262 | W249Y | + |
| 263/264 | L147I | + |

¹Levels of increased activity were determined relative to the reference polypeptide of SEQ ID NO:186 and defined as follows: “+” >1.2 but < 1.5, “++” ≥1.5

### Example 19

### Evolution and Screening of Engineered Polypeptides Derived From SEQ ID NO: 194, SEQ ID NO: 252 for Improved KRED Activity at High Substrate and Low NADP Concentration

[0211] A 200 g/L enzyme stock solution was prepared by dissolving 100 mg of enzyme powder in 500 µL of 100 mM, pH 8 potassium phosphate buffer with 2 mM MgSO₄ and 0.1 g/L of NADP. To a well in a 96 deep-well plate was added a 40 µL aliquot of the enzyme/NADP stock solution, 80 µL of isopropanol, and 80 µL of 40 wt% aqueous solution of iso-α-acids. The final reaction composition was 40 g/L of enzyme, 160 g/L iso-α-acids, and 0.02 g/L NADP in 40% IPA. The plate was sealed and incubated at 40° C. for 24 h and then quenched and analyzed by HPLC-UV. The data are shown in Tables 19-1, 19-2 and 19-3.

TABLE 19-1

KRED Variant Activity Relative to SEQ ID NO:194

| SEQ ID NO: (nt/aa) | Amino Acid Differences (Relative to SEQ ID NO:194) | Percent Conversion Fold Improvement (SEQ ID NO:194) ¹ |
|---|---|---|
| 265/266 | V12I/K72S/I110V/L147I/T152M/E204Q | ++ |
| 267/268 | V12I/K72S/R101Y/T103Q/I110V/T152M/W249Y | ++ |
| 269/270 | E45L/T54S/K72S/I110V/T152M/P194E/E204Q | ++ |
| 271/272 | V12I/T54S/K72T/I110V/A150D/T152M/A153L/P194E/A205M/A211L/W249Y | ++ |
| 273/274 | I110V/A150D/A153L/Y179M/P194E/A205M/A211L/W249Y | + |
| 275/276 | H7Q/V12I/T54S/I110V/A150D/A153L/P194E/A205M/A211L/W249Y | + |
| 277/278 | K72S/I110V/L147M/A150D/T152M/A153L/PI194E/A205M/A211L/W249Y | + |

¹levels of increased activity were determined relative to the reference polypeptide of SEQ ID NO:194 and defined as follows: “+” >1.2 but < 1.5, “++” ≥1.5

TABLE 19-2

KRED Variant Activity Relative to SEQ ID NO: 252

| SEQ ID NO: (nt/aa) | Amino Acid Differences (Relative to SEQ ID NO: 252) | Percent Conversion Fold Improvement (Relative to SEQ ID NO: 252)¹ |
|---|---|---|
| 277/278 | K72S/L147M/T152M/M179Y/W249Y | +++ |
| 275/276 | H7Q/V12I/T54S/M 179Y/W249Y | +++ |
| 271/272 | V12I/T54S/K72T/T152M/M179Y/W249Y | ++++ |
| 273/274 | W249Y | ++ |
| 279/280 | H40E | + |
| 281/282 | T54S/K72S | + |
| 283/284 | H7Q/T152M | ++ |

¹Levels of increased activity were determined relative to the reference polypeptide of SEQ ID NO: 252 and defined as follows: “+” >1.2 but < 1.5, “++” >1.5, “+++” >1.5 but < 2.0; “++++” > 2.0

TABLE 19-3

KRED Activity at High Substrate and Low NADPH Concentration

| SEQ ID NO: (nt/aa) | % Conversion | | | | | |
|---|---|---|---|---|---|---|
| | 40 g/L | 20 g/L | 10 g/L | 5 g/L | 2.5 g/L | 1.25 g/L |
| 193/194 | 43 | 26 | 17 | 7 | 2 | 1 |
| 251/252 | 42 | 30 | 23 | 12 | 5 | 1 |
| 269/270 | 47 | 30 | 22 | 11 | 5 | 2 |
| 271/272 | 48 | 33 | 31 | 25 | 14 | 7 |

### Example 20

### Evolution and Screening of Engineered Polypeptides Derived From SEQ ID NO:270 and SEQ ID NO: 272 for Improved KRED Activity at High Substrate and Low NADP Concentration

[0212] As described in Example 18, libraries of engineered genes were produced using well-established techniques (e.g., saturation mutagenesis, and recombination of previously identified beneficial mutations). The polypeptides encoded by each gene were produced in HTP as described in Example 2, and the soluble lysate was generated as described in Example 3.

[0213] The engineered polynucleotides encoding the polypeptides having KRED activity of SEQ ID NO: 270 (i.e., SEQ ID NO: 269) and NO: 272 (i.e., SEQ ID NO: 271), were used to generate the further improved, engineered polypeptides of Tables 20-1 and 20-2.

TABLE 20-1

KRED Variant Activity Relative to SEQ ID NO:270

| SEQ ID NO: (nt/aa) | Amino Acid Differences (Relative to SEQ ID NO:270) | Percent Conversion Fold Improvement (Relative to SEQ ID NO:270)¹ |
|---|---|---|
| 285/286 | A150Y/M152A | ++ |
| 287/288 | A150Y/M152S | ++ |
| 289/290 | E194S/R195A | + |
| 291/292 | G92A/I93E | + |
| 293/294 | A150D/M152A/A153L | + |

¹Levels of increased activity were determined relative to the reference polypeptide of SEQ ID NO:270 and defined as follows: “+” >1.2 but < 1.5, “++” ≥1.5

TABLE 20-2

KRED Variant Activity Relative to SEQ ID NO: 272

| SEQ ID NO: (nt/aa) | Amino Acid Differences (Relative to SEQ ID NO: 272) | Percent Conversion Fold Improvement (Relative to SEQ ID NO: 272)¹ |
|---|---|---|
| 295/296 | I93D/V95R | +++ |
| 297/298 | I93A/V95K/K109R | ++++ |
| 299/300 | I93A/V95R/K109D/N114T | ++++ |
| 301/302 | I93R/V95A/N114T | +++ |
| 303/304 | I93M | ++ |
| 305/306 | I93E/K109R/N114A | ++ |
| 307/308 | N114A | + |
| 309/310 | G92A/I93D/V95R | ++ |

¹Levels of increased activity were determined relative to the reference polypeptide of SEQ ID NO: 272 and defined as follows: “+” >1.2 but < 1.5, “++” >1.5, “+++” >1.5 but < 2.0, “++++” >2.0

### Example 21

### Evolution and Screening of Engineered Polypeptides Derived From SEQ ID NO: 286 for Improved KRED Activity at High Substrate and Low NADP Concentration

[0214] As described in Example 18, libraries of engineered genes were produced using well-established techniques (e.g., saturation mutagenesis, and recombination of previously identified beneficial mutations). The polypeptides encoded by each gene were produced in HTP as described in Example 2, and the soluble lysate was generated as described in Example 3.

[0215] The engineered polynucleotide encoding the polypeptide having KRED activity of SEQ ID NO: 286 (i.e., SEQ ID NO: 285), were used to generate the further improved, engineered polypeptides of Table 21-1.

TABLE 21-1

KRED Variant Activity Relative to SEQ ID NO: 286

| SEQ ID NO: (nt/aa) | Amino Acid Differences (Relative to SEQ ID NO: 286) | Percent Conversion Fold Improvement (Relative to SEQ ID NO: 286)¹ |
|---|---|---|
| 311/312 | I96A | + |
| 313/314 | M145A/Y150A | + |
| 315/316 | V12I/L45E/W249Y | ++ |
| 317/318 | L45E/W249Y | ++ |
| 319/320 | L45E/K109D/W249Y | +++ |
| 321/322 | L45E/S72T/W249Y | ++ |
| 323/324 | V12I/L45E/I93A/W249Y | ++ |
| 325/326 | V12I/K109D/W249Y | ++ |
| 327/328 | V12I/L45E/S72T/K109D/W249Y | +++ |

¹Levels of increased activity were determined relative to the reference polypeptide of SEQ ID NO: 286 and defined as follows: “+” >1.2 but < 1.5, “++” >1.5, “+++” >1.5 but < 2.0, “++++” >2.0

### Example 22

### Evolution and Screening of Engineered Polypeptides Derived From SEQ ID NO: 328 for Improved KRED Activity

[0216] SEQ ID NO: 328 was selected as the parent enzyme based on the results of screening variants for the reduction of the iso-α-acid substrate. Libraries of engineered genes were produced using well-established techniques (e.g., saturation mutagenesis, and recombination of previously identified beneficial mutations). The polypeptides encoded by each gene were produced in HTP as described in Example 2, and the soluble lysate was generated as described in Example 3.

[0217] The engineered polynucleotide encoding the polypeptide having KRED activity of SEQ ID NO: 327 was used to generate the further engineered polypeptides of Table 22-1. These polypeptides displayed improved formation of dihydro-(rho)-iso-α-acids from iso-α-acids as compared to the starting polypeptide. The engineered polypeptides were generated from the “backbone” amino acid sequence of SEQ ID NO: 328 using directed evolution methods as described above together with the HTP assay and analytical methods described in Table 5-2.

[0218] Directed evolution began with the polynucleotide set forth in SEQ ID NO: 327. Engineered polypeptides were then selected as starting “backbone” gene sequences. Libraries of engineered polypeptides were generated using various well-known techniques (e.g., saturation mutagenesis, recombination of previously identified beneficial amino acid differences) and screened using HTP assay and analysis methods that measured the polypeptides’ ability to convert the iso-α-acid substrates to the desired dihydro-(rho)-iso-α-acid product.

[0219] The enzyme assay was carried out in a 96-well round bottom plate, in 200 µL total volume/well, which included 20% v/v HTP enzyme lysate, 40% v/v of 40 wt% aqueous solution of iso-α-acid substrate (Isolone® Isomerized Hop Extract Solution, Kalsec), and 0.02 g/L NADP in 40 vol% isopropanol (IPA) in 100 mM, pH 8 potassium phosphate with 2 mM MgSO_{4.} The plates were sealed and incubated at 45° C. with shaking at 600 rpm for 20-24 hours.

[0220] After 20-24 hours, 1000 µL of acetonitrile with 0.1% acetic acid were added. The plates were sealed and centrifuged at 4,000 rpm at 4° C. for 10 min. The quenched sample was further diluted 4-5x in 50:50 acetonitrile:water mixture prior to HPLC analysis. The HPLC run parameters are described in Table 5-2 and Table 17-1. The improved variants are shown in Table 22-1.

TABLE 22-1

KRED Variant Activity Relative to SEQ ID NO: 328

| SEQ ID NO: (nt/aa) | Amino Acid Differences (Relative to SEQ ID NO: 328) | Percent Conversion Fold Improvement (Relative to SEQ ID NO: 328)¹ |
|---|---|---|
| 329/330 | Y150A/R195S | +++ |
| 331/332 | Y150A | +++ |
| 333/334 | R195S | ++ |
| 335/336 | R195A | + |
| 337/338 | R195S | + |
| 339/340 | Y150A/P151A | + |
| 341/342 | Y150A/R195S | + |

¹Levels of increased activity were determined relative to the reference polypeptide of SEQ ID NO: 328 and defined as follows: “+” >1.2 but < 1.5, “++” >1.5, “+++” >1.5 but < 2.0, “++++” >2.0

### Example 23

### Performance of SEQ ID NO: 328 and SEQ ID NO: 330 at High Substrate and Low NADP Loadings

[0221] A sample of 8 g of 40 wt% aqueous ISO solution was dissolved in 8 mL of isopropanol (IPA) and 2 mL of 100 mM, pH 8 potassium phosphate buffer. The pH was adjusted to 8 with 4 N NaOH and/or 10% H₃PO₄. 4.5 mL of the pH-adjusted ISO/IPA/buffer solution were added to septum-capped vials with a stir bar and under a nitrogen blanked in a heating block at 40° C. 0.5 mL of 10 or 40 g/L of KRED in 100 mM, pH 8 potassium phosphate buffer with 10 mM of MgSO₄ and 0.2 g/L of NADP were added to the solutions (final KRED and NADP loadings are 1 or 4 g/L KRED and 0.02 g/L NADP respectively). At various time intervals, 20 µL aliquots were withdrawn from the reaction via a syringe, quenched with 1000 µL of 1:1 acetonitrile/water with 0.1% acetic acid. After centrifugation at 4,000 rpm at 20° C. for 5 min, 20 µL of the supernatants were diluted with 180 µL of 1:1 acetonitrile/water with 0.1% acetic acid for HPLC analysis (Table 5-2 and Table 17-1). See FIG. 4.

### Example 24

### Evolution and Screening of Engineered Polypeptides Derived From SEQ ID NO: 330 for Improved KRED Activity

[0222] SEQ ID NO: 330 was selected as the parent enzyme based on the results of screening variants for the reduction of the iso-α-acid substrate. Libraries of engineered genes were produced using well-established techniques (e.g., saturation mutagenesis, and recombination of previously identified beneficial mutations). The polypeptides encoded by each gene were produced in HTP as described in Example 2, and the soluble lysate was generated as described in Example 3.

[0223] The engineered polynucleotide encoding the polypeptide having KRED activity of SEQ ID NO: 329 was used to generate the further engineered polypeptides of Table 24-1. These polypeptides displayed improved formation of dihydro-(rho)-iso-α-acids from iso-α-acids as compared to the starting polypeptide. The engineered polypeptides were generated from the “backbone” amino acid sequence of SEQ ID NO: 330 using directed evolution methods as described above together with the HTP assay and analytical methods described below in Table 24-1.

[0224] Directed evolution began with the polynucleotide set forth in SEQ ID NO: 329. Engineered polypeptides were then selected as starting “backbone” gene sequences. Libraries of engineered polypeptides were generated using various well-known techniques (e.g., saturation mutagenesis, recombination of previously identified beneficial amino acid differences) and screened using HTP assay and analysis methods that measured the polypeptides’ ability to convert the iso-α-acid substrates to the desired dihydro-(rho)-iso-α-acid product.

[0225] The enzyme assay was carried out in a 96-round bottom plate format, in 200 µL total volume/well, which included 50% v/v HTP enzyme lysate, 10% v/v of 40 wt% aqueous solution of iso-α-acid substrate (Isolone® Isomerized Hop Extract Solution, Kalsec), and 0.02 g/L NADP in 40 vol% isopropanol (IPA) in 100 mM, pH 8 potassium phosphate with 2 mM MgSO₄. The plates were sealed and incubated at 45° C. with shaking at 600 rpm for 20-24 hours.

TABLE 24-1

KRED Variant Activity Relative to SEQ ID NO: 330

| SEQ ID NO: (nt/aa) | Amino Acid Differences (Relative to SEQ ID NO: 330) | Percent Conversion Fold Improvement (Relative to SEQ ID NO: 330)¹ |
|---|---|---|
| 343/344 | V95R/S195R | ++ |
| 345/346 | I93A/S 195R | ++ |
| 347/348 | I93A/V95R/M145A/S195R | + |
| 349/350 | I93A/D109K/N114T/M145A/S195R | ++ |
| 351/352 | M145A/S195A | + |
| 353/354 | S195R | + |
| 355/356 | T72K/A152M/S195R | ++ |
| 357/358 | I12V/T72S/D109K/S195R | ++ |
| 359/360 | T72S/D109K/A152M/S195R | ++ |
| 361/362 | T72S/D109K/S195R | ++ |
| 363/364 | T72K/S195R | + |
| 365/366 | I93A | + |
| 367/368 | E194N | + |
| 369/370 | E194N/E200P | + |
| 371/372 | E200P | + |
| 373/374 | E79A | + |
| 375/376 | I96P/E194N/E200P | + |
| 377/378 | I96P/R108S/L147I/E200P | + |
| 379/380 | K192R | + |
| 381/382 | L147I | + |
| 383/384 | L147I/E200P | + |
| 385/386 | L73V | + |
| 387/388 | L73V/L147I | + |
| 389/390 | M17A/L115Q | + |
| 391/392 | M17A/L73V/E200P | + |
| 393/394 | Q198G | + |
| 395/396 | Q198R | + |
| 397/398 | A68R/T72D/R101Q/A152Q/A205L | + |
| 399/400 | A68E/T72D/R101K/A152Q/A205L | + |
| 401/402 | R101M/A205L | + |
| 403/404 | A68R/T72R/L124E | + |
| 405/406 | A68R/T72R/L124E/A152Q | + |
| 407/408 | T72D/A152Q | + |
| 409/410 | A68R/L124E/A205L | + |
| 411/412 | A68R/R101Q/L124E/A152Q/A205L | + |

¹Levels of increased activity were determined relative to the reference polypeptide of SEQ ID NO: 330 and defined as follows: “+” >1.2 but < 1.5, “++” >1.5, “+++” >1.5 but < 2.0, “++++” >2.0

### Example 25

### Performance of SEQ ID NO:270, SEQ ID NO: 328, SEQ ID NO: 330, SEQ ID NO: 348, SEQ ID NO: 346 and SEQ ID NO: 356 at High Substrate and Low NADP Loadings

[0226] A sample of 80 mg of each variant was dissolved in 1 mL of NADP stock solution made up with 10 mg of NADP in 100 mL of 100 mM, pH 9 potassium phosphate and 10 mM of MgSO₄. The stock solution was subjected to 5 successive 1:1 dilutions to give stock solution of 80, 40, 20, 10 and 5 g/L enzyme in NADP stock solution. A 20 uL aliquot of the stock solution was added to 40 uL of 40 wt% ISO solution and 40 uL of IPA in a round-bottom plate to give a final composition of 160 g/L of ISO in 40 vol% of IPA in 20 mM, pH 8 potassium phosphate and 2 mM MgSO₄ with 0.02 g/L of NADP. The final enzyme concentrations were 16, 8, 4, 2 and 1 g/L respectively. The plates were sealed and placed in a shaker at 40° and 600 rpm for 24 hours. After 24 hours, the plates were centrifuged at 4,000 rpm at 20° C. for 10 minutes, and 100 ul of the supernatant were transferred to 1 mL of: 1 acetonitrile/water with 0.1% acetic acid in a deep-well plate. The deep-well plates with the quenched reaction mixture were centrifuged at 4,000 rpm at 20° C. for 10 minutes, and 5 uL of the supernatant were transferred to 200 uL of 1:1 acetonitrile/water with 0.1% acetic acid for HPLC analysis according to Table 5-2 and 17-1. See FIG. 5.

[0227] All publications, patents, patent applications and other documents cited in this application are hereby incorporated by reference in their entireties for all purposes to the same extent as if each individual publication, patent, patent application or other document were individually indicated to be incorporated by reference for all purposes.

[0228] While various specific embodiments have been illustrated and described, it will be appreciated that various changes can be made without departing from the spirit and scope of the invention(s).

What is claimed is:

1. An engineered ketoreductase variant having at least 85%, 90%, 91%, 92%, 93%, 94%, 95%, 96%, 97%, 98%, 99% or more sequence identity to SEQ ID NO: 4, 6, 80, 104, 172, 186, 194, 252, 270, 272, 286, 328, and/or 330.

2. The engineered ketoreductase variant of claim 1, having at least 85%, 90%, 91%, 92%, 93%, 94%, 95%, 96%, 97%, 98%, 99% or more sequence identity to SEQ ID NO: 4, and at least one substitution or substitution set at one or more positions selected from positions 12, 21, 87, 93, 97, 110, 145, 148, 152, 153, 194, 196, 197, 200, 206, 212, and 226, wherein said positions are numbered with reference to SEQ ID NO: 4.

3. The engineered ketoreductase variant of claim 1, having at least 85%, 90%, 91%, 92%, 93%, 94%, 95%, 96%, 97%, 98%, 99% or more sequence identity to SEQ ID NO: 6, and at least one substitution or substitution set selected from 12/110/145/152, 12/145, 87/110/145, 87/110/145/194, 87/145/194, 110, 110/145/152/197, 110/145/194, 145, 145/152, 145/197/226, and 152, wherein said positions are numbered with reference to SEQ ID NO: 6.

4. The engineered ketoreductase variant of claim 1, having at least 85%, 90%, 91%, 92%, 93%, 94%, 95%, 96%, 97%, 98%, 99% or more sequence identity to SEQ ID NO: 80, and at least one substitution or substitution set selected from 17, 21, 46, 56, 72, 79, 95, 101, 110, 152, 162, 190, 198, 210, 211, and 227, wherein said positions are numbered with reference to SEQ ID NO: 80.

5. The engineered ketoreductase variant of claim 1, having at least 85%, 90%, 91%, 92%, 93%, 94%, 95%, 96%, 97%, 98%, 99% or more sequence identity to SEQ ID NO: 80, and at least one substitution or substitution set selected from 17, 79, 157, 159, 190/191/194, 190/194, 191/194, 194, 198, and 211, wherein said positions are numbered with reference to SEQ ID NO: 80.

6. The engineered ketoreductase variant of claim 1, having at least 85%, 90%, 91%, 92%, 93%, 94%, 95%, 96%, 97%, 98%, 99% or more sequence identity to SEQ ID NO: 104, and at least one substitution or substitution set selected from 17/46/190, 17/46/198/211, 17/96/194/198, 17/190/198, 46/190/194/198, and 46/194/198, wherein said positions are numbered with reference to SEQ ID NO: 104.

7. The engineered ketoreductase variant of claim 1, having at least 85%, 90%, 91%, 92%, 93%, 94%, 95%, 96%, 97%, 98%, 99% or more sequence identity to SEQ ID NO: 172, and at least one substitution or substitution set selected from 45, 101, 179, 194, 204, 226, and 231, wherein said positions are numbered with reference to SEQ ID NO: 172.

8. The engineered ketoreductase variant of claim 1, having at least 85%, 90%, 91%, 92%, 93%, 94%, 95%, 96%, 97%, 98%, 99% or more sequence identity to SEQ ID NO: 186, and at least one substitution or substitution set selected from 95/96/97/150/153/205, 95/96/150/153/205/206/211/249, 95/97/143/145/150/153/202/205, 95/97/143/145/150/153/249, 95/97/150/153, 95/97/150/153/202/205/206, 95/150/153/205/206/211, 95/150/153/205/211, 95/150/153/206/249, 96/150/153, 96/150/153/206, 97/150/153, 97/150/153/205, 97/150/153/205/211, 97/150/153/206, 143/144/145/150/153/202/205/249, 143/145/150/153, 144/145/150/153/205/206, 144/150/153, 144/150/153/202/205/206, 145/150/153/206/249, 145/153/211, 150/153/202/206/249, 150/153/205/211, 150/153/206/211, 150/153/211, and 150/153/249, wherein said positions are numbered with reference to SEQ ID NO: 186.

9. The engineered ketoreductase variant of claim 1, having at least 85%, 90%, 91%, 92%, 93%, 94%, 95%, 96%, 97%, 98%, 99% or more sequence identity to SEQ ID NO: 186, and at least one substitution or substitution set selected from 7/147, 103/147, 110, 110/179/194, 147, and 249, wherein said positions are numbered with reference to SEQ ID NO: 186.

10. The engineered ketoreductase variant of claim 1, having at least 85%, 90%, 91%, 92%, 93%, 94%, 95%, 96%, 97%, 98%, 99% or more sequence identity to SEQ ID NO: 194, and at least one substitution or substitution set selected from 7/12/54/110/150/153/194/205/211/249, 12/54/72/110/150/152/153/194/205/211/249, 12/72/101/103/110/152/249, 12/72/110/147/152/204, 45/54/72/110/152/194/204, 72/110/147/150/152/153/194/205/211/249, and 110/150/153/179/194/205/211/249, wherein said positions are numbered with reference to SEQ ID NO: 194.

11. The engineered ketoreductase variant of claim 1, having at least 85%, 90%, 91%, 92%, 93%, 94%, 95%, 96%, 97%, 98%, 99% or more sequence identity to SEQ ID NO: 252, and at least one substitution or substitution set selected from 7/12/54/179/249, 7/152, 12/54/72/152/179/249, 40, 54/72, 72/147/152/179/249, and 249, wherein said positions are numbered with reference to SEQ ID NO: 252.

12. The engineered ketoreductase variant of claim 1, having at least 85%, 90%, 91%, 92%, 93%, 94%, 95%, 96%, 97%, 98%, 99% or more sequence identity to SEQ ID NO: 270, and at least one substitution or substitution set selected from 92/93, 150/152, 150/152/153, and 194/195, wherein said positions are numbered with reference to SEQ ID NO: 270.

13. The engineered ketoreductase variant of claim 1, having at least 85%, 90%, 91%, 92%, 93%, 94%, 95%, 96%, 97%, 98%, 99% or more sequence identity to SEQ ID NO: 272, and at least one substitution or substitution set selected from 92/93/95, 93, 93/95, 93/95/109, 93/95/109/114, 93/95/114, 93/109/114, and 114, wherein said positions are numbered with reference to SEQ ID NO: 272.

14. The engineered ketoreductase variant of claim 1, having at least 85%, 90%, 91%, 92%, 93%, 94%, 95%, 96%, 97%, 98%, 99% or more sequence identity to SEQ ID NO: 286, and at least one substitution or substitution set selected from 12/45/72/109/249, 12/45/93/249, 12/45/249, 12/109/249, 45/72/249, 45/109/249, 45/249, 96, and 145/150, wherein said positions are numbered with reference to SEQ ID NO: 286.

15. The engineered ketoreductase variant of claim 1, having at least 85%, 90%, 91%, 92%, 93%, 94%, 95%, 96%, 97%, 98%, 99% or more sequence identity to SEQ ID NO: 328, and at least one substitution or substitution set selected from 150, 150/151, 150/195, and 195, wherein said positions are numbered with reference to SEQ ID NO: 328.

16. The engineered ketoreductase variant of claim 1, having at least 85%, 90%, 91%, 92%, 93%, 94%, 95%, 96%, 97%, 98%, 99% or more sequence identity to SEQ ID NO: 330, and at least one substitution or substitution set selected from 12/72/109/195, 17/73/200, 17/115, 68/72/101/152/205, 68/72/124, 68/72/124/152, 68/101/124/152/205, 68/124/205, 72/109/152/195, 72/109/195, 72/152, 72/152/195, 72/195, 73, 73/147, 79, 93, 93/95/145/195, 93/109/114/145/195, 93/195, 95/195, 96/108/147/200, 96/194/200, 101/205, 145/195, 147, 147/200, 192, 194, 194/200, 195, 198, and 200, wherein said positions are numbered with reference to SEQ ID NO: 330.

17-18. (canceled)

19. The engineered ketoreductase variant of claim 1, comprising a polypeptide sequence set forth in SEQ ID NO: 6, 80, 104, 172, 186, 194, 252, 270, 272, 286, 328, and/or 330.

20. (canceled)

21. The engineered ketoreductase variant of claim 1, wherein said engineered ketoreductase comprises a polypeptide sequence selected from the even-numbered sequences set forth in SEQ ID NOS: 6 to 412.

22. (canceled)

23. The engineered ketoreductase variant of claim 1 which is capable of converting one or more iso-α-acid substrates to one or more corresponding dihydro-(rho)-iso-α-acid products with at least 10-fold the activity of the reference polypeptide of SEQ ID NO:4.

24. The engineered ketoreductase variant of claim 1, wherein said engineered ketoreductase comprises an improved property as compared to the ketoreductase of SEQ ID NO: 4.

25. The engineered ketoreductase variant of claim 24, wherein the improved property comprises improved activity converting iso-α-acids to the corresponding dihydro-(rho)-iso-α-acids as compared to the ketoreductase of SEQ ID NO: 4.

26. The engineered ketoreductase variant of claim 24, wherein the improved property comprises improved activity at high substrate concentrations as compared to the ketoreductase of SEQ ID NO: 4.

27. The engineered ketoreductase variant of claim 24, wherein the improved property comprises improved activity at low cofactor concentrations as compared to the ketoreductase of SEQ ID NO: 4.

28. An engineered polynucleotide sequence encoding the engineered ketoreductase variant of claim 1.

29. The engineered polynucleotide sequence of claim 28, wherein said sequence comprises a polynucleotide sequence that is at least 85%, 90%, 91%, 92%, 93%, 94%, 95%, 96%, 97%, 98%, 99% or more identical to a sequence selected from the odd-numbered sequences set forth in SEQ ID NOS: 5 to 411.

30. A vector comprising the engineered polynucleotide sequence of claim 28.

31. The vector of claim 30, further comprising at least one control sequence.

32. The vector of claim 30, wherein said vector comprises SEQ ID NO: 413 or 414.

33. A host cell comprising the vector of claim 30 .

34. A method for producing the engineered ketoreductase variant of claim 1, comprising culturing a host cell under conditions that said engineered ketoreductase variant is produced by said host cell.

35. The method of claim 34, further comprising the step of recovering said engineered ketoreductase variant produced by said host cell.

36. The method of claim 34, wherein the engineered ketoreductase variant is produced by a host cell comprising the vector of SEQ ID NO: 413 and/or 414.

37. A composition comprising at least one engineered ketoreductase variant provided in claim 1.

The application's sequence listing, which the Patent Office published only in electronic form, follows.

SEQUENCE LISTING (414 sequences)

SEQ ID NO: 1 - DNA, 759 bp, Artificial Sequence
  Wild-Type Kred from Lactobacillus kefir
atgaccgatcgtctgaagggcaaagtagccatcgtaaccggcgggactctgggtatcggtttggcaatcgccgataaatttgtagaggagggtgcgaaagtagttattactggtcgtcacgcggatgtaggtgaaaaggccgccaaatcaatcggcggcactgatgttattcgctttgtccagcacgatgcatccgatgaagcaggctggacgaaactgttcgacaccaccgaggaggcattcggcccggttacgaccgtcgtgaacaatgcagggattgcagtttccaaaagcgttgaagacactaccacggaggaatggcgtaaactgctgtccgttaatctggatggtgtttttttcggcacccgtctgggcattcagcgcatgaaaaataaaggcttgggcgctagcatcatcaatatgagcagtattgaggggttcgtaggcgatccgacgctgggggcatacaacgcttccaagggggcggtacgtatcatgtcgaaaagcgcagcgctggattgcgcactgaaggactacgatgtgcgtgtcaacacagtacatccgggctatatcaagaccccgctggtcgatgatctggaaggtgctgaggaaatgatgtcacagcgtacgaaaacccctatgggccacattggcgaaccgaatgacatcgcatggatctgtgtgtacctggcatctgacgaatcgaaatttgcgacgggtgcagaatttgtggtcgacggcgggtataccgcacagtga

SEQ ID NO: 2 - protein, 252 aa, Artificial Sequence
  Wild Type Kred from Lactobacillus kefir
MTDRLKGKVAIVTGGTLGIGLAIADKFVEEGAKVVITGRHADVGEKAAKSIGGTDVIRFVQHDASDEAGWTKLFDTTEEAFGPVTTVVNNAGIAVSKSVEDTTTEEWRKLLSVNLDGVFFGTRLGIQRMKNKGLGASIINMSSIEGFVGDPTLGAYNASKGAVRIMSKSAALDCALKDYDVRVNTVHPGYIKTPLVDDLEGAEEMMSQRTKTPMGHIGEPNDIAWICVYLASDESKFATGAEFVVDGGYTAQ

SEQ ID NO: 3 - DNA, 759 bp, Artificial Sequence
  Engineered Variant of Kred from Lactobacillus kefir
atgaccgatcgtctgaagcataaagtagccatcgtaaccggcgggacactgggtatcggtttggcaatcgccgataaatttgtagaggagggtgcgaaagtagttattactggtcgtcacgcggatgtaggtgaaaaggccgccaaatcaatcggcggcactgatgttattcgctttgtccagcacgatgcgtccgaagaagcaggctggacgaaactgttcgacaccaccgaggaggcattcggcccggttacgaccgtcgtgaacaatgcagggattggggttattaaaagcgttgaagacactaccacggaggaatggcgtaaactgctgtccgttaatctggatggtgtttttttcggcacccgtctgggcattcagcgcatgaaaaataaaggcttgggcgctagcatcatcaatatgagcagtattctggggctcgtaggcgatccgacgctgggggcatacaacgcttccaagggggcggtacgtatcatgtcgaaaagcgcagcgctggattgcgcactgaaggactacgatgtgcgtgtcaacacagtacatccgggccccatcaagaccccgcggctcgatgatctggaaggttgggaggaaatgatgtcacagcgtacgttaacccctatgggccacattggcgaaccgaatgacatcgcatggatctgtgtgtacctggcatctgacgaatcgaaatttgcgacgggtgcagaatttgtggtcgacggcgggtggaccgcacagtga

SEQ ID NO: 4 - protein, 252 aa, Artificial Sequence
  Engineered Variant of Kred from Lactobacillus kefir
MTDRLKHKVAIVTGGTLGIGLAIADKFVEEGAKVVITGRHADVGEKAAKSIGGTDVIRFVQHDASEEAGWTKLFDTTEEAFGPVTTVVNNAGIGVIKSVEDTTTEEWRKLLSVNLDGVFFGTRLGIQRMKNKGLGASIINMSSILGLVGDPTLGAYNASKGAVRIMSKSAALDCALKDYDVRVNTVHPGPIKTPRLDDLEGWEEMMSQRTLTPMGHIGEPNDIAWICVYLASDESKFATGAEFVVDGGWTAQ

SEQ ID NO: 5 - DNA, 756 bp, Artificial Sequence
  Engineered Variant of Kred from Lactobacillus kefir
atgaccgatcgtctgaagcataaagtagccatcgtaaccggcgggacactgggtatcggtttggcaatcgccgataaatttgtagaggagggtgcgaaagtagttattactggtcgtcacgcggatgtaggtgaaaaggccgccaaatcaatcggcggcactgatgttattcgctttgtccagcacgatgcgtccgaagaagcaggctggacgaaactgttcgacaccaccgaggaggcattcggcccggttacgaccgtcgtgaacaatgcagggattggggttattaaaagcgttgaagacactaccacggaggaatggcgtaaactgctgtccgttaatctggatggtgtttttttcggcacccgtctgggcattcagcgcatgaaaaataaaggcttgggcgctagcatcatcaatatgagcagtattctggggctcgtaggcgatccgacgctgggggcatacaacgcttccaagggggcggtacgtatcatgtcgaaaagcgcagcgctggattgcgcactgaaggactacgatgtgcgtgtcaacacagtacatccgggccccatcaagaccccgcggaaggatgatctggaaggttgggaggaaatgatgtcacagcgtacgttaacccctatgggccacattggcgaaccgaatgacatcgcatggatctgtgtgtacctggcatctgacgaatcgaaatttgcgacgggtgcagaatttgtggtcgacggcgggtggaccgcacag

SEQ ID NO: 6 - protein, 252 aa, Artificial Sequence
  Engineered Variant of Kred from Lactobacillus kefir
MTDRLKHKVAIVTGGTLGIGLAIADKFVEEGAKVVITGRHADVGEKAAKSIGGTDVIRFVQHDASEEAGWTKLFDTTEEAFGPVTTVVNNAGIGVIKSVEDTTTEEWRKLLSVNLDGVFFGTRLGIQRMKNKGLGASIINMSSILGLVGDPTLGAYNASKGAVRIMSKSAALDCALKDYDVRVNTVHPGPIKTPRKDDLEGWEEMMSQRTLTPMGHIGEPNDIAWICVYLASDESKFATGAEFVVDGGWTAQ

SEQ ID NO: 7 - DNA, 756 bp, Artificial Sequence
  Engineered Variant of Kred from Lactobacillus kefir
atgaccgatcgtctgaagcataaagtagccatcgtaaccggcgggacactgggtatcggtttggcaatcgccgataaatttgtagaggagggtgcgaaagtagttattactggtcgtcacgcggatgtaggtgaaaaggccgccaaatcaatcggcggcactgatgttattcgctttgtccagcacgatgcgtccgaagaagcaggctggacgaaactgttcgacaccaccgaggaggcattcggcccggttacgaccgtcgtgaacaatgcagggattggggttattaaaagcgttgaagacactaccacggaggaatggcgtaaactgctgtccgttaatctggatggtgtttttttcggcacccgtctgggcattcagcgcatgaaaaataaaggcttgggcgctagcatcatcaatatgagcagtattctggggctcgtaggcgatccgacgctgggggcatacaacgcttccaagggggcggtacgtatcatgtcgaaaagcgcagcgctggattgcgcactgaaggactacgatgtgcgtgtcaacacagtacatccgggccccatcaagaccccgcggagggatgatctggaaggttgggaggaaatgatgtcacagcgtacgttaacccctatgggccacattggcgaaccgaatgacatcgcatggatctgtgtgtacctggcatctgacgaatcgaaatttgcgacgggtgcagaatttgtggtcgacggcgggtggaccgcacag

SEQ ID NO: 8 - protein, 252 aa, Artificial Sequence
  Engineered Variant of Kred from Lactobacillus kefir
MTDRLKHKVAIVTGGTLGIGLAIADKFVEEGAKVVITGRHADVGEKAAKSIGGTDVIRFVQHDASEEAGWTKLFDTTEEAFGPVTTVVNNAGIGVIKSVEDTTTEEWRKLLSVNLDGVFFGTRLGIQRMKNKGLGASIINMSSILGLVGDPTLGAYNASKGAVRIMSKSAALDCALKDYDVRVNTVHPGPIKTPRRDDLEGWEEMMSQRTLTPMGHIGEPNDIAWICVYLASDESKFATGAEFVVDGGWTAQ

SEQ ID NO: 9 - DNA, 756 bp, Artificial Sequence
  Engineered Variant of Kred from Lactobacillus kefir
atgaccgatcgtctgaagcataaagtagccatcgtaaccggcgggacactgggtatcggtttggcaatcgccgataaatttgtagaggagggtgcgaaagtagttattactggtcgtcacgcggatgtaggtgaaaaggccgccaaatcaatcggcggcactgatgttattcgctttgtccagcacgatgcgtccgaagaagcaggctggacgaaactgttcgacaccaccgaggaggcattcggcccggttacgaccgtcgtgaacaatgcagggattggggttattaaaagcgttgaagacactaccacggaggaatggcgtaaactgctgtccgttaatctggatggtgtttttttcggcacccgtctgggcattcagcgcatgaaaaataaaggcttgggcgctagcatcatcaatatgagcagtattctggggctcgtaggcgatccgacgaggggggcatacaacgcttccaagggggcggtacgtatcatgtcgaaaagcgcagcgctggattgcgcactgaaggactacgatgtgcgtgtcaacacagtacatccgggccccatcaagaccccgcggctcgatgatctggaaggttgggaggaaatgatgtcacagcgtacgttaacccctatgggccacattggcgaaccgaatgacatcgcatggatctgtgtgtacctggcatctgacgaatcgaaatttgcgacgggtgcagaatttgtggtcgacggcgggtggaccgcacag

SEQ ID NO: 10 - protein, 252 aa, Artificial Sequence
  Engineered Variant of Kred from Lactobacillus kefir
MTDRLKHKVAIVTGGTLGIGLAIADKFVEEGAKVVITGRHADVGEKAAKSIGGTDVIRFVQHDASEEAGWTKLFDTTEEAFGPVTTVVNNAGIGVIKSVEDTTTEEWRKLLSVNLDGVFFGTRLGIQRMKNKGLGASIINMSSILGLVGDPTRGAYNASKGAVRIMSKSAALDCALKDYDVRVNTVHPGPIKTPRLDDLEGWEEMMSQRTLTPMGHIGEPNDIAWICVYLASDESKFATGAEFVVDGGWTAQ

SEQ ID NO: 11 - DNA, 756 bp, Artificial Sequence
  Engineered Variant of Kred from Lactobacillus kefir
atgaccgatcgtctgaagcataaagtagccatcgtaaccggcgggacactgggtatcggtttggcaatcgccgataaatttgtagaggagggtgcgaaagtagttattactggtcgtcacgcggatgtaggtgaaaaggccgccaaatcaatcggcggcactgatgttattcgctttgtccagcacgatgcgtccgaagaagcaggctggacgaaactgttcgacaccaccgaggaggcattcggcccggttacgaccgtcgtgaacaatgcagggattggggttattaaaagcgttgaagacactaccacggaggaatggcgtaaactgctgtccgttaatctggatggtgtttttttcggcacccgtctgggcattcagcgcatgaaaaataaaggcttgggcgctagcatcatcaatatgagcagtatttctgggctcgtaggcgatccgacgctgggggcatacaacgcttccaagggggcggtacgtatcatgtcgaaaagcgcagcgctggattgcgcactgaaggactacgatgtgcgtgtcaacacagtacatccgggccccatcaagaccccgcggctcgatgatctggaaggttgggaggaaatgatgtcacagcgtacgttaacccctatgggccacattggcgaaccgaatgacatcgcatggatctgtgtgtacctggcatctgacgaatcgaaatttgcgacgggtgcagaatttgtggtcgacggcgggtggaccgcacag

SEQ ID NO: 12 - protein, 252 aa, Artificial Sequence
  Engineered Variant of Kred from Lactobacillus kefir
MTDRLKHKVAIVTGGTLGIGLAIADKFVEEGAKVVITGRHADVGEKAAKSIGGTDVIRFVQHDASEEAGWTKLFDTTEEAFGPVTTVVNNAGIGVIKSVEDTTTEEWRKLLSVNLDGVFFGTRLGIQRMKNKGLGASIINMSSISGLVGDPTLGAYNASKGAVRIMSKSAALDCALKDYDVRVNTVHPGPIKTPRLDDLEGWEEMMSQRTLTPMGHIGEPNDIAWICVYLASDESKFATGAEFVVDGGWTAQ

SEQ ID NO: 13 - DNA, 756 bp, Artificial Sequence
  Engineered Variant of Kred from Lactobacillus kefir
atgaccgatcgtctgaagcataaagtagccatcgtaaccggcgggacactgggtatcggtttggcaatcgccgataaatttgtagaggagggtgcgaaagtagttattactggtcgtcacgcggatgtaggtgaaaaggccgccaaatcaatcggcggcactgatgttattcgctttgtccagcacgatgcgtccgaagaagcaggctggacgaaactgttcgacaccaccgaggaggcattcggcccggttacgaccgtcgtgaacaatgcagggattggggttattaaaagcgttgaagacactaccacggaggaatggcgtaaactgctgtccgttaatctggatggtgtttttttcggcacccgtctgggcattcagcgcatgaaaaataaaggcttgggcgctagcatcatcaatatgagcagtattctggggctcgtaggcgatccgggtctgggggcatacaacgcttccaagggggcggtacgtatcatgtcgaaaagcgcagcgctggattgcgcactgaaggactacgatgtgcgtgtcaacacagtacatccgggccccatcaagaccccgcggctcgatgatctggaaggttgggaggaaatgatgtcacagcgtacgttaacccctatgggccacattggcgaaccgaatgacatcgcatggatctgtgtgtacctggcatctgacgaatcgaaatttgcgacgggtgcagaatttgtggtcgacggcgggtggaccgcacag

SEQ ID NO: 14 - protein, 252 aa, Artificial Sequence
  Engineered Variant of Kred from Lactobacillus kefir
MTDRLKHKVAIVTGGTLGIGLAIADKFVEEGAKVVITGRHADVGEKAAKSIGGTDVIRFVQHDASEEAGWTKLFDTTEEAFGPVTTVVNNAGIGVIKSVEDTTTEEWRKLLSVNLDGVFFGTRLGIQRMKNKGLGASIINMSSILGLVGDPGLGAYNASKGAVRIMSKSAALDCALKDYDVRVNTVHPGPIKTPRLDDLEGWEEMMSQRTLTPMGHIGEPNDIAWICVYLASDESKFATGAEFVVDGGWTAQ

SEQ ID NO: 15 - DNA, 756 bp, Artificial Sequence
  Engineered Variant of Kred from Lactobacillus kefir
atgaccgatcgtctgaagcataaagtagccatcgtaaccggcgggacactgggtatcggtttggcaatcgccgataaatttgtagaggagggtgcgaaagtagttattactggtcgtcacgcggatgtaggtgaaaaggccgccaaatcaatcggcggcactgatgttattcgctttgtccagcacgatgcgtccgaagaagcaggctggacgaaactgttcgacaccaccgaggaggcattcggcccggttacgaccgtcgtgaacaatgcagggattggggttattaaaagcgttgaagacactaccacggaggaatggcgtaaactgctgtccgttaatctggatggtgtttttttcggcacccgtctgggcattcagcgcatgaaaaataaaggcttgggcgctagcatcatcaatatgagcagtattctggggctcgtaggcgatccgacgctgggggcatacaacgcttccaagggggcggtacgtatcatgtcgaaaagcgcagcgctggattgcgcactgaaggactacgatgtgcgtgtcaacacagtacatccgggccccatcaagaccccgcggcatgatgatctggaaggttgggaggaaatgatgtcacagcgtacgttaacccctatgggccacattggcgaaccgaatgacatcgcatggatctgtgtgtacctggcatctgacgaatcgaaatttgcgacgggtgcagaatttgtggtcgacggcgggtggaccgcacag

SEQ ID NO: 16 - protein, 252 aa, Artificial Sequence
  Engineered Variant of Kred from Lactobacillus kefir
MTDRLKHKVAIVTGGTLGIGLAIADKFVEEGAKVVITGRHADVGEKAAKSIGGTDVIRFVQHDASEEAGWTKLFDTTEEAFGPVTTVVNNAGIGVIKSVEDTTTEEWRKLLSVNLDGVFFGTRLGIQRMKNKGLGASIINMSSILGLVGDPTLGAYNASKGAVRIMSKSAALDCALKDYDVRVNTVHPGPIKTPRHDDLEGWEEMMSQRTLTPMGHIGEPNDIAWICVYLASDESKFATGAEFVVDGGWTAQ

SEQ ID NO: 17 - DNA, 756 bp, Artificial Sequence
  Engineered Variant of Kred from Lactobacillus kefir
atgaccgatcgtctgaagcataaagtagccatcgtaaccggcgggacactgggtatcggtttggcaatcgccgataaatttgtagaggagggtgcgaaagtagttattactggtcgtcacgcggatgtaggtgaaaaggccgccaaatcaatcggcggcactgatgttattcgctttgtccagcacgatgcgtccgaagaagcaggctggacgaaactgttcgacaccaccgaggaggcattcggcccggttacgaccgtcgtgaacaatgcaggggttggggttattaaaagcgttgaagacactaccacggaggaatggcgtaaactgctgtccgttaatctggatggtgtttttttcggcacccgtctgggcattcagcgcatgaaaaataaaggcttgggcgctagcatcatcaatatgagcagtattctggggctcgtaggcgatccgacgctgggggcatacaacgcttccaagggggcggtacgtatcatgtcgaaaagcgcagcgctggattgcgcactgaaggactacgatgtgcgtgtcaacacagtacatccgggccccatcaagaccccgcggctcgatgatctggaaggttgggaggaaatgatgtcacagcgtacgttaacccctatgggccacattggcgaaccgaatgacatcgcatggatctgtgtgtacctggcatctgacgaatcgaaatttgcgacgggtgcagaatttgtggtcgacggcgggtggaccgcacag

SEQ ID NO: 18 - protein, 252 aa, Artificial Sequence
  Engineered Variant of Kred from Lactobacillus kefir
MTDRLKHKVAIVTGGTLGIGLAIADKFVEEGAKVVITGRHADVGEKAAKSIGGTDVIRFVQHDASEEAGWTKLFDTTEEAFGPVTTVVNNAGVGVIKSVEDTTTEEWRKLLSVNLDGVFFGTRLGIQRMKNKGLGASIINMSSILGLVGDPTLGAYNASKGAVRIMSKSAALDCALKDYDVRVNTVHPGPIKTPRLDDLEGWEEMMSQRTLTPMGHIGEPNDIAWICVYLASDESKFATGAEFVVDGGWTAQ

SEQ ID NO: 19 - DNA, 756 bp, Artificial Sequence
  Engineered Variant of Kred from Lactobacillus kefir
atgaccgatcgtctgaagcataaagtagccatcgtaaccggcgggacactgggtatcggtttggcaatcgccgataaatttgtagaggagggtgcgaaagtagttattactggtcgtcacgcggatgtaggtgaaaaggccgccaaatcaatcggcggcactgatgttattcgctttgtccagcacgatgcgtccgaagaagcaggctggacgaaactgttcgacaccaccgaggaggcattcggcccggttacgaccgtcgtgaacaatgcagggattggggttattaaaagcgttgaagacactaccacggaggaatggcgtaaactgctgtccgttaatctggatggtgtttttttcggcacccgtctgggcattcagcgcatgaaaaataaaggcttgggcgctagcatcatcaatatgagcagtattatggggctcgtaggcgatccgacgctgggggcatacaacgcttccaagggggcggtacgtatcatgtcgaaaagcgcagcgctggattgcgcactgaaggactacgatgtgcgtgtcaacacagtacatccgggccccatcaagaccccgcggctcgatgatctggaaggttgggaggaaatgatgtcacagcgtacgttaacccctatgggccacattggcgaaccgaatgacatcgcatggatctgtgtgtacctggcatctgacgaatcgaaatttgcgacgggtgcagaatttgtggtcgacggcgggtggaccgcacag

SEQ ID NO: 20 - protein, 252 aa, Artificial Sequence
  Engineered Variant of Kred from Lactobacillus kefir
MTDRLKHKVAIVTGGTLGIGLAIADKFVEEGAKVVITGRHADVGEKAAKSIGGTDVIRFVQHDASEEAGWTKLFDTTEEAFGPVTTVVNNAGIGVIKSVEDTTTEEWRKLLSVNLDGVFFGTRLGIQRMKNKGLGASIINMSSIMGLVGDPTLGAYNASKGAVRIMSKSAALDCALKDYDVRVNTVHPGPIKTPRLDDLEGWEEMMSQRTLTPMGHIGEPNDIAWICVYLASDESKFATGAEFVVDGGWTAQ

SEQ ID NO: 21 - DNA, 756 bp, Artificial Sequence
  Engineered Variant of Kred from Lactobacillus kefir
atgaccgatcgtctgaagcataaagtagccatcgtaaccggcgggacactgggtatcggtttggcaatcgccgataaatttgtagaggagggtgcgaaagtagttattactggtcgtcacgcggatgtaggtgaaaaggccgccaaatcaatcggcggcactgatgttattcgctttgtccagcacgatgcgtccgaagaagcaggctggacgaaactgttcgacaccaccgaggaggcattcggcccggttacgaccgtcgtgaacaatgcagggattggggttattaaaagcgttgaagacactaccacggaggaatggcgtaaactgctgtccgttaatctggatggtgtttttttcggcacccgtctgggcattcagcgcatgaaaaataaaggcttgggcgctagcatcatcaatatgagcagtattggtgggctcgtaggcgatccgacgctgggggcatacaacgcttccaagggggcggtacgtatcatgtcgaaaagcgcagcgctggattgcgcactgaaggactacgatgtgcgtgtcaacacagtacatccgggccccatcaagaccccgcggctcgatgatctggaaggttgggaggaaatgatgtcacagcgtacgttaacccctatgggccacattggcgaaccgaatgacatcgcatggatctgtgtgtacctggcatctgacgaatcgaaatttgcgacgggtgcagaatttgtggtcgacggcgggtggaccgcacag

SEQ ID NO: 22 - protein, 252 aa, Artificial Sequence
  Engineered Variant of Kred from Lactobacillus kefir
MTDRLKHKVAIVTGGTLGIGLAIADKFVEEGAKVVITGRHADVGEKAAKSIGGTDVIRFVQHDASEEAGWTKLFDTTEEAFGPVTTVVNNAGIGVIKSVEDTTTEEWRKLLSVNLDGVFFGTRLGIQRMKNKGLGASIINMSSIGGLVGDPTLGAYNASKGAVRIMSKSAALDCALKDYDVRVNTVHPGPIKTPRLDDLEGWEEMMSQRTLTPMGHIGEPNDIAWICVYLASDESKFATGAEFVVDGGWTAQ

SEQ ID NO: 23 - DNA, 756 bp, Artificial Sequence
  Engineered Variant of Kred from Lactobacillus kefir
atgaccgatcgtctgaagcataaagtagccatcgtaaccggcgggacactgggtatcggtttggcaatcgccgataaatttgtagaggagggtgcgaaagtagttattactggtcgtcacgcggatgtaggtgaaaaggccgccaaatcaatcggcggcactgatgttattcgctttgtccagcacgatgcgtccgaagaagcaggctggacgaaactgttcgacaccaccgaggaggcattcggcccggttacgaccgtcgtgaacaatgcagggattggggttattaaaagcgttgaagacactaccacggaggaatggcgtaaactgctgtccgttaatctggatggtgtttttttcggcacccgtctgggcattcagcgcatgaaaaataaaggcttgggcgctagcatcatcaatatgagcagtatttgtgggctcgtaggcgatccgacgctgggggcatacaacgcttccaagggggcggtacgtatcatgtcgaaaagcgcagcgctggattgcgcactgaaggactacgatgtgcgtgtcaacacagtacatccgggccccatcaagaccccgcggctcgatgatctggaaggttgggaggaaatgatgtcacagcgtacgttaacccctatgggccacattggcgaaccgaatgacatcgcatggatctgtgtgtacctggcatctgacgaatcgaaatttgcgacgggtgcagaatttgtggtcgacggcgggtggaccgcacag

SEQ ID NO: 24 - protein, 252 aa, Artificial Sequence
  Engineered Variant of Kred from Lactobacillus kefir
MTDRLKHKVAIVTGGTLGIGLAIADKFVEEGAKVVITGRHADVGEKAAKSIGGTDVIRFVQHDASEEAGWTKLFDTTEEAFGPVTTVVNNAGIGVIKSVEDTTTEEWRKLLSVNLDGVFFGTRLGIQRMKNKGLGASIINMSSICGLVGDPTLGAYNASKGAVRIMSKSAALDCALKDYDVRVNTVHPGPIKTPRLDDLEGWEEMMSQRTLTPMGHIGEPNDIAWICVYLASDESKFATGAEFVVDGGWTAQ

SEQ ID NO: 25 - DNA, 756 bp, Artificial Sequence
  Engineered Variant of Kred from Lactobacillus kefir
atgaccgatcgtctgaagcataaagtagccatcgtaaccggcgggacactgggtatcggtttggcaatcgccgataaatttgtagaggagggtgcgaaagtagttattactggtcgtcacgcggatgtaggtgaaaaggccgccaaatcaatcggcggcactgatgttattcgctttgtccagcacgatgcgtccgaagaagcaggctggacgaaactgttcgacaccaccgaggaggcattcggcccggttacgaccgtcgtgaacaatgcagggattggggttattaaaagcgttgaagacactaccacggaggaatggcgtaaactgctgtccgttaatctggatggtgtttttttcggcacccgtctgggcattcagcgcatgaaaaataaaggcttgggcgctagcatcatcaatatgagcagtattctggggctcgtaggcgatccgacggttggggcatacaacgcttccaagggggcggtacgtatcatgtcgaaaagcgcagcgctggattgcgcactgaaggactacgatgtgcgtgtcaacacagtacatccgggccccatcaagaccccgcggctcgatgatctggaaggttgggaggaaatgatgtcacagcgtacgttaacccctatgggccacattggcgaaccgaatgacatcgcatggatctgtgtgtacctggcatctgacgaatcgaaatttgcgacgggtgcagaatttgtggtcgacggcgggtggaccgcacag

SEQ ID NO: 26 - protein, 252 aa, Artificial Sequence
  Engineered Variant of Kred from Lactobacillus kefir
MTDRLKHKVAIVTGGTLGIGLAIADKFVEEGAKVVITGRHADVGEKAAKSIGGTDVIRFVQHDASEEAGWTKLFDTTEEAFGPVTTVVNNAGIGVIKSVEDTTTEEWRKLLSVNLDGVFFGTRLGIQRMKNKGLGASIINMSSILGLVGDPTVGAYNASKGAVRIMSKSAALDCALKDYDVRVNTVHPGPIKTPRLDDLEGWEEMMSQRTLTPMGHIGEPNDIAWICVYLASDESKFATGAEFVVDGGWTAQ

SEQ ID NO: 27 - DNA, 756 bp, Artificial Sequence
  Engineered Variant of Kred from Lactobacillus kefir
atgaccgatcgtctgaagcataaagtagccatcgtaaccggcgggacactgggtatcggtttggcaatcgccgataaatttgtagaggagggtgcgaaagtagttattactggtcgtcacgcggatgtaggtgaaaaggccgccaaatcaatcggcggcactgatgttattcgctttgtccagcacgatgcgtccgaagaagcaggctggacgaaactgttcgacaccaccgaggaggcattcggcccggttacgaccgtcgtgaacaatgcagggattggggttattaaaagcgttgaagacactaccacggaggaatggcgtaaactgctgtccgttaatctggatggtgtttttttcggcacccgtctgggcattcagcgcatgaaaaataaaggcttgggcgctagcatcatcaatatgagcagtattctggggctcgtaggcgatccgacgctgggggcatacaacgcttccaagggggcggtacgtatcatgtcgaaaagcgcagcgctggattgcgcactgaaggactacgatgtgcgtgtcaacacagtacatccgggccccatcaagaccccgcggctcagggatctggaaggttgggaggaaatgatgtcacagcgtacgttaacccctatgggccacattggcgaaccgaatgacatcgcatggatctgtgtgtacctggcatctgacgaatcgaaatttgcgacgggtgcagaatttgtggtcgacggcgggtggaccgcacag

SEQ ID NO: 28 - protein, 252 aa, Artificial Sequence
  Engineered Variant of Kred from Lactobacillus kefir
MTDRLKHKVAIVTGGTLGIGLAIADKFVEEGAKVVITGRHADVGEKAAKSIGGTDVIRFVQHDASEEAGWTKLFDTTEEAFGPVTTVVNNAGIGVIKSVEDTTTEEWRKLLSVNLDGVFFGTRLGIQRMKNKGLGASIINMSSILGLVGDPTLGAYNASKGAVRIMSKSAALDCALKDYDVRVNTVHPGPIKTPRLRDLEGWEEMMSQRTLTPMGHIGEPNDIAWICVYLASDESKFATGAEFVVDGGWTAQ

SEQ ID NO: 29 - DNA, 756 bp, Artificial Sequence
  Engineered Variant of Kred from Lactobacillus kefir
atgaccgatcgtctgaagcataaagtagccatcgtaaccggcgggacactgggtatcggtagggcaatcgccgataaatttgtagaggagggtgcgaaagtagttattactggtcgtcacgcggatgtaggtgaaaaggccgccaaatcaatcggcggcactgatgttattcgctttgtccagcacgatgcgtccgaagaagcaggctggacgaaactgttcgacaccaccgaggaggcattcggcccggttacgaccgtcgtgaacaatgcagggattggggttattaaaagcgttgaagacactaccacggaggaatggcgtaaactgctgtccgttaatctggatggtgtttttttcggcacccgtctgggcattcagcgcatgaaaaataaaggcttgggcgctagcatcatcaatatgagcagtattctggggctcgtaggcgatccgacgctgggggcatacaacgcttccaagggggcggtacgtatcatgtcgaaaagcgcagcgctggattgcgcactgaaggactacgatgtgcgtgtcaacacagtacatccgggccccatcaagaccccgcggctcgatgatctggaaggttgggaggaaatgatgtcacagcgtacgttaacccctatgggccacattggcgaaccgaatgacatcgcatggatctgtgtgtacctggcatctgacgaatcgaaatttgcgacgggtgcagaatttgtggtcgacggcgggtggaccgcacag

SEQ ID NO: 30 - protein, 252 aa, Artificial Sequence
  Engineered Variant of Kred from Lactobacillus kefir
MTDRLKHKVAIVTGGTLGIGRAIADKFVEEGAKVVITGRHADVGEKAAKSIGGTDVIRFVQHDASEEAGWTKLFDTTEEAFGPVTTVVNNAGIGVIKSVEDTTTEEWRKLLSVNLDGVFFGTRLGIQRMKNKGLGASIINMSSILGLVGDPTLGAYNASKGAVRIMSKSAALDCALKDYDVRVNTVHPGPIKTPRLDDLEGWEEMMSQRTLTPMGHIGEPNDIAWICVYLASDESKFATGAEFVVDGGWTAQ

SEQ ID NO: 31 - DNA, 756 bp, Artificial Sequence
  Engineered Variant of Kred from Lactobacillus kefir
atgaccgatcgtctgaagcataaagtagccatcgtaaccggcgggacactgggtatcggtttggcaatcgccgataaatttgtagaggagggtgcgaaagtagttattactggtcgtcacgcggatgtaggtgaaaaggccgccaaatcaatcggcggcactgatgttattcgctttgtccagcacgatgcgtccgaagaagcaggctggacgaaactgttcgacaccaccgaggaggcattcggcccggttacgaccgtcgtgaacaatgcaggggatggggttattaaaagcgttgaagacactaccacggaggaatggcgtaaactgctgtccgttaatctggatggtgtttttttcggcacccgtctgggcattcagcgcatgaaaaataaaggcttgggcgctagcatcatcaatatgagcagtattctggggctcgtaggcgatccgacgctgggggcatacaacgcttccaagggggcggtacgtatcatgtcgaaaagcgcagcgctggattgcgcactgaaggactacgatgtgcgtgtcaacacagtacatccgggccccatcaagaccccgcggctcgatgatctggaaggttgggaggaaatgatgtcacagcgtacgttaacccctatgggccacattggcgaaccgaatgacatcgcatggatctgtgtgtacctggcatctgacgaatcgaaatttgcgacgggtgcagaatttgtggtcgacggcgggtggaccgcacag

SEQ ID NO: 32 - protein, 252 aa, Artificial Sequence
  Engineered Variant of Kred from Lactobacillus kefir
MTDRLKHKVAIVTGGTLGIGLAIADKFVEEGAKVVITGRHADVGEKAAKSIGGTDVIRFVQHDASEEAGWTKLFDTTEEAFGPVTTVVNNAGDGVIKSVEDTTTEEWRKLLSVNLDGVFFGTRLGIQRMKNKGLGASIINMSSILGLVGDPTLGAYNASKGAVRIMSKSAALDCALKDYDVRVNTVHPGPIKTPRLDDLEGWEEMMSQRTLTPMGHIGEPNDIAWICVYLASDESKFATGAEFVVDGGWTAQ

SEQ ID NO: 33 - DNA, 756 bp, Artificial Sequence
  Engineered Variant of Kred from Lactobacillus kefir
atgaccgatcgtctgaagcataaagtagccatcgtaaccggcgggacactgggtatcggtttggcaatcgccgataaatttgtagaggagggtgcgaaagtagttattactggtcgtcacgcggatgtaggtgaaaaggccgccaaatcaatcggcggcactgatgttattcgctttgtccagcacgatgcgtccgaagaagcaggctggacgaaactgttcgacaccaccgaggaggcattcggcccggttacgaccgtcgtgaacaatgcagggattggggttattaaaagcgttgaagacactaccacggaggaatggcgtaaactgctgtccgttaatctggatggtgtttttttcggcacccgtctgggcattcagcgcatgaaaaataaaggcttgggcgctagcatcatcaatatgagcagtattctggggctcattggcgatccgacgctgggggcatacaacgcttccaagggggcggtacgtatcatgtcgaaaagcgcagcgctggattgcgcactgaaggactacgatgtgcgtgtcaacacagtacatccgggccccatcaagaccccgcggctcgatgatctggaaggttgggaggaaatgatgtcacagcgtacgttaacccctatgggccacattggcgaaccgaatgacatcgcatggatctgtgtgtacctggcatctgacgaatcgaaatttgcgacgggtgcagaatttgtggtcgacggcgggtggaccgcacag

SEQ ID NO: 34 - protein, 252 aa, Artificial Sequence
  Engineered Variant of Kred from Lactobacillus kefir
MTDRLKHKVAIVTGGTLGIGLAIADKFVEEGAKVVITGRHADVGEKAAKSIGGTDVIRFVQHDASEEAGWTKLFDTTEEAFGPVTTVVNNAGIGVIKSVEDTTTEEWRKLLSVNLDGVFFGTRLGIQRMKNKGLGASIINMSSILGLIGDPTLGAYNASKGAVRIMSKSAALDCALKDYDVRVNTVHPGPIKTPRLDDLEGWEEMMSQRTLTPMGHIGEPNDIAWICVYLASDESKFATGAEFVVDGGWTAQ

SEQ ID NO: 35 - DNA, 756 bp, Artificial Sequence
  Engineered Variant of Kred from Lactobacillus kefir
atgaccgatcgtctgaagcataaagtagccatcgtaaccggcgggacactgggtatcggtttggcaatcgccgataaatttgtagaggagggtgcgaaagtagttattactggtcgtcacgcggatgtaggtgaaaaggccgccaaatcaatcggcggcactgatgttattcgctttgtccagcacgatgcgtccgaagaagcaggctggacgaaactgttcgacaccaccgaggaggcattcggcccggttacgaccgtcgtgaacaatgcagggattggggttattaaaagcgttgaagacactaccacggaggaatggcgtaaactgctgtccgttaatctggatggtgtttttttcggcacccgtctgggcattcagcgcatgaaaaataaaggcttgggcgctagcatcatcaatatgagcagtattctggggctcgtaggcgatccgacgtgtggggcatacaacgcttccaagggggcggtacgtatcatgtcgaaaagcgcagcgctggattgcgcactgaaggactacgatgtgcgtgtcaacacagtacatccgggccccatcaagaccccgcggctcgatgatctggaaggttgggaggaaatgatgtcacagcgtacgttaacccctatgggccacattggcgaaccgaatgacatcgcatggatctgtgtgtacctggcatctgacgaatcgaaatttgcgacgggtgcagaatttgtggtcgacggcgggtggaccgcacag

SEQ ID NO: 36 - protein, 252 aa, Artificial Sequence
  Engineered Variant of Kred from Lactobacillus kefir
MTDRLKHKVAIVTGGTLGIGLAIADKFVEEGAKVVITGRHADVGEKAAKSIGGTDVIRFVQHDASEEAGWTKLFDTTEEAFGPVTTVVNNAGIGVIKSVEDTTTEEWRKLLSVNLDGVFFGTRLGIQRMKNKGLGASIINMSSILGLVGDPTCGAYNASKGAVRIMSKSAALDCALKDYDVRVNTVHPGPIKTPRLDDLEGWEEMMSQRTLTPMGHIGEPNDIAWICVYLASDESKFATGAEFVVDGGWTAQ

SEQ ID NO: 37 - DNA, 756 bp, Artificial Sequence
  Engineered Variant of Kred from Lactobacillus kefir
atgaccgatcgtctgaagcataaagtagccatcgtaaccggcgggacactgggtatcggtttggcaatcgccgataaatttgtagaggagggtgcgaaagtagttattactggtcgtcacgcggatgtaggtgaaaaggccgccaaatcaatcggcggcactgatgttattcgctttgtccagcacgatgcgtccgaagaagcaggctggacgaaactgttcgacaccaccgaggaggcattcggcccggttacgaccgtcgtgaacaatgcagggattggggttattaaaagcgttgaagacactaccacggaggaatggcgtaaactgctgtccgttaatctggatggtgtttttttcggcacccgtctgggcattcagcgcatgaaaaataaaggcttgggcgctagcatcatcaatatgagcagtattctggggctcgtaggcgatccgacgctgggggcatacaacgcttccaagggggcggtacgtatcatgtcgaaaagcgcagcgctggattgcgcactgaaggactacgatgtgcgtgtcaacacagtacatccgggccccatcaagaccccgcggctcgatgatctgcagggttgggaggaaatgatgtcacagcgtacgttaacccctatgggccacattggcgaaccgaatgacatcgcatggatctgtgtgtacctggcatctgacgaatcgaaatttgcgacgggtgcagaatttgtggtcgacggcgggtggaccgcacag

SEQ ID NO: 38 - protein, 252 aa, Artificial Sequence
  Engineered Variant of Kred from Lactobacillus kefir
MTDRLKHKVAIVTGGTLGIGLAIADKFVEEGAKVVITGRHADVGEKAAKSIGGTDVIRFVQHDASEEAGWTKLFDTTEEAFGPVTTVVNNAGIGVIKSVEDTTTEEWRKLLSVNLDGVFFGTRLGIQRMKNKGLGASIINMSSILGLVGDPTLGAYNASKGAVRIMSKSAALDCALKDYDVRVNTVHPGPIKTPRLDDLQGWEEMMSQRTLTPMGHIGEPNDIAWICVYLASDESKFATGAEFVVDGGWTAQ

SEQ ID NO: 39 - DNA, 756 bp, Artificial Sequence
  Engineered Variant of Kred from Lactobacillus kefir
atgaccgatcgtctgaagcataaagtagccatcgtaaccggcgggacactgggtatcggtttggcaatcgccgataaatttgtagaggagggtgcgaaagtagttattactggtcgtcacgcggatgtaggtgaaaaggccgccaaatcaatcggcggcactgatgttattcgctttgtccagcacgatgcgtccgaagaagcaggctggacgaaactgttcgacaccaccgaggaggcattcggcccggttacgaccgtcgtgaacaatgcagggattggggttattaaaagcgttgaagacactaccacggaggaatggcgtaaactgctgtccgttaatctggatggtgtttttttcggcacccgtctgggcattcagcgcatgaaaaataaaggcttgggcgctagcatcatcaatatgagcagtattctggggctcgtaggcgatccgacgctgggggcatacaacgcttccaagggggcggtacgtatcatgtcgaaaagcgcagcgctggattgcgcactgaaggactacgatgtgcgtgtcaacacagtacatccgggccccatcaagaccaggcggctcgatgatctggaaggttgggaggaaatgatgtcacagcgtacgttaacccctatgggccacattggcgaaccgaatgacatcgcatggatctgtgtgtacctggcatctgacgaatcgaaatttgcgacgggtgcagaatttgtggtcgacggcgggtggaccgcacag

SEQ ID NO: 40 - protein, 252 aa, Artificial Sequence
  Engineered Variant of Kred from Lactobacillus kefir
MTDRLKHKVAIVTGGTLGIGLAIADKFVEEGAKVVITGRHADVGEKAAKSIGGTDVIRFVQHDASEEAGWTKLFDTTEEAFGPVTTVVNNAGIGVIKSVEDTTTEEWRKLLSVNLDGVFFGTRLGIQRMKNKGLGASIINMSSILGLVGDPTLGAYNASKGAVRIMSKSAALDCALKDYDVRVNTVHPGPIKTRRLDDLEGWEEMMSQRTLTPMGHIGEPNDIAWICVYLASDESKFATGAEFVVDGGWTAQ

SEQ ID NO: 41 - DNA, 756 bp, Artificial Sequence
  Engineered Variant of Kred from Lactobacillus kefir
atgaccgatcgtctgaagcataaagtagccatcgtaaccggcgggacactgggtatcggtttggcaatcgccgataaatttgtagaggagggtgcgaaagtagttattactggtcgtcacgcggatgtaggtgaaaaggccgccaaatcaatcggcggcactgatgttattcgctttgtccagcacgatgcgtccgaagaagcaggctggacgaaactgttcgacaccaccgaggaggcattcggcccggttacgaccgtcgtgaacaatgcagggattggggttattaaaagcgttgaagacactaccacggaggaatggcgtaaactgctgtccgttaatctggatggtgtttttttcggcacccgtctgggcattcagcgcatgaaaaataaaggcttgggcgctagcatcatcaatatgagcagtattctggggctcgtaggcgatccgacgctgggggcatacaacgcttccaagggggcggtacgtatcatgtcgaaaagcgcagcgctggattgcgcactgaaggactacgatgtgcgtgtcaacacagtacatccgggccccatcaagaccccgcggctcgatgatctgcggggttgggaggaaatgatgtcacagcgtacgttaacccctatgggccacattggcgaaccgaatgacatcgcatggatctgtgtgtacctggcatctgacgaatcgaaatttgcgacgggtgcagaatttgtggtcgacggcgggtggaccgcacag

SEQ ID NO: 42 - protein, 252 aa, Artificial Sequence
  Engineered Variant of Kred from Lactobacillus kefir
MTDRLKHKVAIVTGGTLGIGLAIADKFVEEGAKVVITGRHADVGEKAAKSIGGTDVIRFVQHDASEEAGWTKLFDTTEEAFGPVTTVVNNAGIGVIKSVEDTTTEEWRKLLSVNLDGVFFGTRLGIQRMKNKGLGASIINMSSILGLVGDPTLGAYNASKGAVRIMSKSAALDCALKDYDVRVNTVHPGPIKTPRLDDLRGWEEMMSQRTLTPMGHIGEPNDIAWICVYLASDESKFATGAEFVVDGGWTAQ

SEQ ID NO: 43 - DNA, 756 bp, Artificial Sequence
  Engineered Variant of Kred from Lactobacillus kefir
atgaccgatcgtctgaagcataaagtagccatcgtaaccggcgggacactgggtatcggtttggcaatcgccgataaatttgtagaggagggtgcgaaagtagttattactggtcgtcacgcggatgtaggtgaaaaggccgccaaatcaatcggcggcactgatgttattcgctttgtccagcacgatgcgtccgaagaagcaggctggacgaaactgttcgacaccaccgaggaggcattcggcccggttacgaccgtcgtgaacaatgcagggattggggttattaaaagcgttgaagacactaccacggaggaatggcgtaaactgctgtccgttaatctggatggtgtttttttcggcacccgtctgggcattcagcgcatgaaaaataaaggcttgggcgctagcatcatcaatatgagcagtattctggggctcgtaggcgatccgacgctgggggcatacaacgcttccaagggggcggtacgtatcatgtcgaaaagcgcagcgctggattgcgcactgaaggactacgatgtgcgtgtcaacacagtacatccgggccccatcaagaccccgcggctcgatgatctggaaggttgggaggaaatggtgtcacagcgtacgttaacccctatgggccacattggcgaaccgaatgacatcgcatggatctgtgtgtacctggcatctgacgaatcgaaatttgcgacgggtgcagaatttgtggtcgacggcgggtggaccgcacag

SEQ ID NO: 44 - protein, 252 aa, Artificial Sequence
  Engineered Variant of Kred from Lactobacillus kefir
MTDRLKHKVAIVTGGTLGIGLAIADKFVEEGAKVVITGRHADVGEKAAKSIGGTDVIRFVQHDASEEAGWTKLFDTTEEAFGPVTTVVNNAGIGVIKSVEDTTTEEWRKLLSVNLDGVFFGTRLGIQRMKNKGLGASIINMSSILGLVGDPTLGAYNASKGAVRIMSKSAALDCALKDYDVRVNTVHPGPIKTPRLDDLEGWEEMVSQRTLTPMGHIGEPNDIAWICVYLASDESKFATGAEFVVDGGWTAQ

SEQ ID NO: 45 - DNA, 756 bp, Artificial Sequence
  Engineered Variant of Kred from Lactobacillus kefir
atgaccgatcgtctgaagcataaagtagccatcgtaaccggcgggacactgggtatcggtttggcaatcgccgataaatttgtagaggagggtgcgaaagtagttattactggtcgtcacgcggatgtaggtgaaaaggccgccaaatcaatcggcggcactgatgttattcgctttgtccagcacgatgcgtccgaagaagcaggctggacgaaactgttcgacaccaccgaggaggcattcggcccggttacgaccgtcgtgaacaatgcagggatgggggttattaaaagcgttgaagacactaccacggaggaatggcgtaaactgctgtccgttaatctggatggtgtttttttcggcacccgtctgggcattcagcgcatgaaaaataaaggcttgggcgctagcatcatcaatatgagcagtattctggggctcgtaggcgatccgacgctgggggcatacaacgcttccaagggggcggtacgtatcatgtcgaaaagcgcagcgctggattgcgcactgaaggactacgatgtgcgtgtcaacacagtacatccgggccccatcaagaccccgcggctcgatgatctggaaggttgggaggaaatgatgtcacagcgtacgttaacccctatgggccacattggcgaaccgaatgacatcgcatggatctgtgtgtacctggcatctgacgaatcgaaatttgcgacgggtgcagaatttgtggtcgacggcgggtggaccgcacag

SEQ ID NO: 46 - protein, 252 aa, Artificial Sequence
  Engineered Variant of Kred from Lactobacillus kefir
MTDRLKHKVAIVTGGTLGIGLAIADKFVEEGAKVVITGRHADVGEKAAKSIGGTDVIRFVQHDASEEAGWTKLFDTTEEAFGPVTTVVNNAGMGVIKSVEDTTTEEWRKLLSVNLDGVFFGTRLGIQRMKNKGLGASIINMSSILGLVGDPTLGAYNASKGAVRIMSKSAALDCALKDYDVRVNTVHPGPIKTPRLDDLEGWEEMMSQRTLTPMGHIGEPNDIAWICVYLASDESKFATGAEFVVDGGWTAQ

SEQ ID NO: 47 - DNA, 756 bp, Artificial Sequence
  Engineered Variant of Kred from Lactobacillus kefir
atgaccgatcgtctgaagcataaagtagccatcgtaaccggcgggacactgggtatcggtttggcaatcgccgataaatttgtagaggagggtgcgaaagtagttattactggtcgtcacgcggatgtaggtgaaaaggccgccaaatcaatcggcggcactgatgttattcgctttgtccagcacgatgcgtccgaagaagcaggctggacgaaactgttcgacaccaccgaggaggcattcggcccggttacgaccgtcgtgaacaatgcagggattggggttattaaaagcgttgaagacactaccacggaggaatggcgtaaactgctgtccgttaatctggatggtgtttttttcggcacccgtctgggcattcagcgcatgaaaaataaaggcttgggcgctagcatcatcaatatgagcagtattctggggctcgtaggcgatccgacgctgggggcatacaacgcttccaagggggcggtacgtatcatgtcgaaaagcgcagcgctggattgcgcactgaaggactacgatgtgcgtgtcaacacagtacatccgggccccatcaagaccccgcggctcggtgatctggaaggttgggaggaaatgatgtcacagcgtacgttaacccctatgggccacattggcgaaccgaatgacatcgcatggatctgtgtgtacctggcatctgacgaatcgaaatttgcgacgggtgcagaatttgtggtcgacggcgggtggaccgcacag

SEQ ID NO: 48 - protein, 252 aa, Artificial Sequence
  Engineered Variant of Kred from Lactobacillus kefir
MTDRLKHKVAIVTGGTLGIGLAIADKFVEEGAKVVITGRHADVGEKAAKSIGGTDVIRFVQHDASEEAGWTKLFDTTEEAFGPVTTVVNNAGIGVIKSVEDTTTEEWRKLLSVNLDGVFFGTRLGIQRMKNKGLGASIINMSSILGLVGDPTLGAYNASKGAVRIMSKSAALDCALKDYDVRVNTVHPGPIKTPRLGDLEGWEEMMSQRTLTPMGHIGEPNDIAWICVYLASDESKFATGAEFVVDGGWTAQ

SEQ ID NO: 49 - DNA, 756 bp, Artificial Sequence
  Engineered Variant of Kred from Lactobacillus kefir
atgaccgatcgtctgaagcataaagtagccatcgtaaccggcgggacactgggtatcggtttggcaatcgccgataaatttgtagaggagggtgcgaaagtagttattactggtcgtcacgcggatgtaggtgaaaaggccgccaaatcaatcggcggcactgatgttattcgctttgtccagcacgatgcgtccgaagaagcaggctggacgaaactgttcgacaccaccgaggaggcattcggcccggttacgaccgtcgtgaacaatgcagggattggggttattaaaagcgttgaagacactaccacggaggaatggcgtaaactgctgtccgttaatctggatggtgtttttttcggcacccgtctgggcattcagcgcatgaaaaataaaggcttgggcgctagcatcatcaatatgagcagtattctggggctcgtaggcgatccgacgctgggggcatacaacgcttccaagggggcggtacgtatcatgtcgaaaagcgcagcgctggattgcgcactgaaggactacgatgtgcgtgtcaacacagtacatccgggccccatcaagaccaatcggctcgatgatctggaaggttgggaggaaatgatgtcacagcgtacgttaacccctatgggccacattggcgaaccgaatgacatcgcatggatctgtgtgtacctggcatctgacgaatcgaaatttgcgacgggtgcagaatttgtggtcgacggcgggtggaccgcacag

SEQ ID NO: 50 - protein, 252 aa, Artificial Sequence
  Engineered Variant of Kred from Lactobacillus kefir
MTDRLKHKVAIVTGGTLGIGLAIADKFVEEGAKVVITGRHADVGEKAAKSIGGTDVIRFVQHDASEEAGWTKLFDTTEEAFGPVTTVVNNAGIGVIKSVEDTTTEEWRKLLSVNLDGVFFGTRLGIQRMKNKGLGASIINMSSILGLVGDPTLGAYNASKGAVRIMSKSAALDCALKDYDVRVNTVHPGPIKTNRLDDLEGWEEMMSQRTLTPMGHIGEPNDIAWICVYLASDESKFATGAEFVVDGGWTAQ

SEQ ID NO: 51 - DNA, 756 bp, Artificial Sequence
  Engineered Variant of Kred from Lactobacillus kefir
atgaccgatcgtctgaagcataaagtagccatcgtaaccggcgggacactgggtatcggtttggcaatcgccgataaatttgtagaggagggtgcgaaagtagttattactggtcgtcacgcggatgtaggtgaaaaggccgccaaatcaatcggcggcactgatgttattcgctttgtccagcacgatgcgtccgaagaagcaggctggacgaaactgttcgacaccaccgaggaggcattcggcccggttacgaccgtcgtgaacaatgcagggattggggttattaaaagcgttgaagacactaccacggaggaatggcgtaaactgctgtccgttaatctggatggtgtttttttcggcacccgtctgggcattcagcgcatgaaaaataaaggcttgggcgctagcatcatcaatatgagcagtattctggggctcgtaggcgatccgacgctgggggcatacaacgcttccaagggggcggtacgtatcatgtcgaaaagcgcagcgctggattgcgcactgaaggactacgatgtgcgtgtcaacacagtacatccgggccccatcaagaccccgcggctcgatgatctgttgggttgggaggaaatgatgtcacagcgtacgttaacccctatgggccacattggcgaaccgaatgacatcgcatggatctgtgtgtacctggcatctgacgaatcgaaatttgcgacgggtgcagaatttgtggtcgacggcgggtggaccgcacag

SEQ ID NO: 52 - protein, 252 aa, Artificial Sequence
  Engineered Variant of Kred from Lactobacillus kefir
MTDRLKHKVAIVTGGTLGIGLAIADKFVEEGAKVVITGRHADVGEKAAKSIGGTDVIRFVQHDASEEAGWTKLFDTTEEAFGPVTTVVNNAGIGVIKSVEDTTTEEWRKLLSVNLDGVFFGTRLGIQRMKNKGLGASIINMSSILGLVGDPTLGAYNASKGAVRIMSKSAALDCALKDYDVRVNTVHPGPIKTPRLDDLLGWEEMMSQRTLTPMGHIGEPNDIAWICVYLASDESKFATGAEFVVDGGWTAQ

SEQ ID NO: 53 - DNA, 756 bp, Artificial Sequence
  Engineered Variant of Kred from Lactobacillus kefir
atgaccgatcgtctgaagcataaagtagccatcgtaaccggcgggacactgggtatcggtttggcaatcgccgataaatttgtagaggagggtgcgaaagtagttattactggtcgtcacgcggatgtaggtgaaaaggccgccaaatcaatcggcggcactgatgttattcgctttgtccagcacgatgcgtccgaagaagcaggctggacgaaactgttcgacaccaccgaggaggcattcggcccggttacgaccgtcgtgaacaatgcagggattggggttattaaaagcgttgaagacactaccacggaggaatggcgtaaaattctgtccgttaatctggatggtgtttttttcggcacccgtctgggcattcagcgcatgaaaaataaaggcttgggcgctagcatcatcaatatgagcagtattctggggctcgtaggcgatccgacgctgggggcatacaacgcttccaagggggcggtacgtatcatgtcgaaaagcgcagcgctggattgcgcactgaaggactacgatgtgcgtgtcaacacagtacatccgggccccatcaagaccccgcggctcgatgatctggaaggttgggaggaaatgatgtcacagcgtacgttaacccctatgggccacattggcgaaccgaatgacatcgcatggatctgtgtgtacctggcatctgacgaatcgaaatttgcgacgggtgcagaatttgtggtcgacggcgggtggaccgcacag

SEQ ID NO: 54 - protein, 252 aa, Artificial Sequence
  Engineered Variant of Kred from Lactobacillus kefir
MTDRLKHKVAIVTGGTLGIGLAIADKFVEEGAKVVITGRHADVGEKAAKSIGGTDVIRFVQHDASEEAGWTKLFDTTEEAFGPVTTVVNNAGIGVIKSVEDTTTEEWRKILSVNLDGVFFGTRLGIQRMKNKGLGASIINMSSILGLVGDPTLGAYNASKGAVRIMSKSAALDCALKDYDVRVNTVHPGPIKTPRLDDLEGWEEMMSQRTLTPMGHIGEPNDIAWICVYLASDESKFATGAEFVVDGGWTAQ

SEQ ID NO: 55 - DNA, 756 bp, Artificial Sequence
  Engineered Variant of Kred from Lactobacillus kefir
atgaccgatcgtctgaagcataaagtagccatcgtaaccggcgggacactgggtatcggtttggcaatcgccgataaatttgtagaggagggtgcgaaagtagttattactggtcgtcacgcggatgtaggtgaaaaggccgccaaatcaatcggcggcactgatgttattcgctttgtccagcacgatgcgtccgaagaagcaggctggacgaaactgttcgacaccaccgaggaggcattcggcccggttacgaccgtcgtgaacaatgcagggattggggttattaaaagcgttgaagacactaccacggaggaatggcgtaaactgctgtccgttaatctggatggtgtttttttcggcacccgtctgggcattcagcgcatgaaaaataaaggcttgggcgctagcatcatcaatatgagcagtattctggggctcgtaggcgatccgacgctgggggcatacaacgcttccaagggggcggtacgtatcatgtcgaaaagcgcagcgctggattgcgcactgaaggactacgatgtgcgtgtcaacacagtacatccgggccccatcaagaccccgcggctcgatgatctggaaggttgggaggaaatgatgtcacagcgtacgttaacccctatgggccacattggcgaaccgaatgacatcgcatggctgtgtgtgtacctggcatctgacgaatcgaaatttgcgacgggtgcagaatttgtggtcgacggcgggtggaccgcacag

SEQ ID NO: 56 - protein, 252 aa, Artificial Sequence
  Engineered Variant of Kred from Lactobacillus kefir
MTDRLKHKVAIVTGGTLGIGLAIADKFVEEGAKVVITGRHADVGEKAAKSIGGTDVIRFVQHDASEEAGWTKLFDTTEEAFGPVTTVVNNAGIGVIKSVEDTTTEEWRKLLSVNLDGVFFGTRLGIQRMKNKGLGASIINMSSILGLVGDPTLGAYNASKGAVRIMSKSAALDCALKDYDVRVNTVHPGPIKTPRLDDLEGWEEMMSQRTLTPMGHIGEPNDIAWLCVYLASDESKFATGAEFVVDGGWTAQ

SEQ ID NO: 57 - DNA, 756 bp, Artificial Sequence
  Engineered Variant of Kred from Lactobacillus kefir
atgaccgatcgtctgaagcataaagtagccatcgtaaccggcgggacactgggtatcggtttggcaatcgccgataaatttgtagaggagggtgcgaaagtagttattactggtcgtcacgcggatgtaggtgaaaaggccgccaaatcaatcggcggcactgatgttattcgctttgtccagcacgatgcgtccgaagaagcaggctggacgaaactgttcgacaccaccgaggaggcattcggcccggttacgaccgtcgtgaacaatgcagggacgggggttattaaaagcgttgaagacactaccacggaggaatggcgtaaactgctgtccgttaatctggatggtgtttttttcggcacccgtctgggcattcagcgcatgaaaaataaaggcttgggcgctagcatcatcaatatgagcagtattctggggctcgtaggcgatccgacgctgggggcatacaacgcttccaagggggcggtacgtatcatgtcgaaaagcgcagcgctggattgcgcactgaaggactacgatgtgcgtgtcaacacagtacatccgggccccatcaagaccccgcggctcgatgatctggaaggttgggaggaaatgatgtcacagcgtacgttaacccctatgggccacattggcgaaccgaatgacatcgcatggatctgtgtgtacctggcatctgacgaatcgaaatttgcgacgggtgcagaatttgtggtcgacggcgggtggaccgcacag

SEQ ID NO: 58 - protein, 252 aa, Artificial Sequence
  Engineered Variant of Kred from Lactobacillus kefir
MTDRLKHKVAIVTGGTLGIGLAIADKFVEEGAKVVITGRHADVGEKAAKSIGGTDVIRFVQHDASEEAGWTKLFDTTEEAFGPVTTVVNNAGTGVIKSVEDTTTEEWRKLLSVNLDGVFFGTRLGIQRMKNKGLGASIINMSSILGLVGDPTLGAYNASKGAVRIMSKSAALDCALKDYDVRVNTVHPGPIKTPRLDDLEGWEEMMSQRTLTPMGHIGEPNDIAWICVYLASDESKFATGAEFVVDGGWTAQ

SEQ ID NO: 59 - DNA, 756 bp, Artificial Sequence
  Engineered Variant of Kred from Lactobacillus kefir
atgaccgatcgtctgaagcataaagtagccatcgtaaccggcgggacactgggtatcggtttggcaatcgccgataaatttgtagaggagggtgcgaaagtagttattactggtcgtcacgcggatgtaggtgaaaaggccgccaaatcaatcggcggcactgatgttattcgctttgtccagcacgatgcgtccgaagaagcaggctggacgaaactgttcgacaccaccgaggaggcattcggcccggttacgaccgtcgtgaacaatgcagggattggggttattaaaagcgttgaagacactaccacggaggaatggcgtaaactgctgtccgttaatctggatggtgtttttttcggcacccgtctgggcattcagcgcatgaaaaataaaggcttgggcgctagcatcatcaatatgagcagtattctggggctcgtaggcgatccgacgctgggggcatacaacgcttccaagggggcggtacgtatcatgtcgaaaagcgcagcgctggattgcgcactgaaggactacgatgtgcgtgtcaacacagtacatccgggccccatcaagaccccgcggctcgatgatctggaaggttgggaggaaatgatgtcacagcgtacgttaagtcctatgggccacattggcgaaccgaatgacatcgcatggatctgtgtgtacctggcatctgacgaatcgaaatttgcgacgggtgcagaatttgtggtcgacggcgggtggaccgcacag

SEQ ID NO: 60 - protein, 252 aa, Artificial Sequence
  Engineered Variant of Kred from Lactobacillus kefir
MTDRLKHKVAIVTGGTLGIGLAIADKFVEEGAKVVITGRHADVGEKAAKSIGGTDVIRFVQHDASEEAGWTKLFDTTEEAFGPVTTVVNNAGIGVIKSVEDTTTEEWRKLLSVNLDGVFFGTRLGIQRMKNKGLGASIINMSSILGLVGDPTLGAYNASKGAVRIMSKSAALDCALKDYDVRVNTVHPGPIKTPRLDDLEGWEEMMSQRTLSPMGHIGEPNDIAWICVYLASDESKFATGAEFVVDGGWTAQ

SEQ ID NO: 61 - DNA, 756 bp, Artificial Sequence
  Engineered Variant of Kred from Lactobacillus kefir
atgaccgatcgtctgaagcataaagtagccatcgtaaccggcgggacactgggtatcggtttggcaatcgccgataaatttgtagaggagggtgcgaaagtagttattactggtcgtcacgcggatgtaggtgaaaaggccgccaaatcaatcggcggcactgatgttattcgctttgtccagcacgatgcgtccgaagaagcaggctggacgaaactgttcgacaccaccgaggaggcattcggcccggttacgaccgtcgtgaacaatgcagggattggggttattaaaagcgttgaagacactaccacggaggaatggcgtaaactgctgtccgttaatctggatggtgtttttttcggcacccgtctgggcattcagcgcatgaaaaataaaggcttgggcgctagcatcatcaatatgagcagtattctggggctcgtaggcgatccgacgctgggggcatacaacgcttccaagggggcggtacgtatcatgtcgaaaagcgcagcgctggattgcgcactgaaggactacgatgtgcgtgtcaacacagtacatccgggccccatcaagacccatcggctcgatgatctggaaggttgggaggaaatgatgtcacagcgtacgttaacccctatgggccacattggcgaaccgaatgacatcgcatggatctgtgtgtacctggcatctgacgaatcgaaatttgcgacgggtgcagaatttgtggtcgacggcgggtggaccgcacag

SEQ ID NO: 62 - protein, 252 aa, Artificial Sequence
  Engineered Variant of Kred from Lactobacillus kefir
MTDRLKHKVAIVTGGTLGIGLAIADKFVEEGAKVVITGRHADVGEKAAKSIGGTDVIRFVQHDASEEAGWTKLFDTTEEAFGPVTTVVNNAGIGVIKSVEDTTTEEWRKLLSVNLDGVFFGTRLGIQRMKNKGLGASIINMSSILGLVGDPTLGAYNASKGAVRIMSKSAALDCALKDYDVRVNTVHPGPIKTHRLDDLEGWEEMMSQRTLTPMGHIGEPNDIAWICVYLASDESKFATGAEFVVDGGWTAQ

SEQ ID NO: 63 - DNA, 756 bp, Artificial Sequence
  Engineered Variant of Kred from Lactobacillus kefir
atgaccgatcgtctgaagcataaagtagccatcgtaaccggcgggacactgggtatcggtttggcaatcgccgataaatttgtagaggagggtgcgaaagtagttattactggtcgtcacgcggatgtaggtgaaaaggccgccaaatcaatcggcggcactgatgttattcgctttgtccagcacgatgcgtccgaagaagcaggctggacgaaactgttcgacaccaccgaggaggcattcggcccggttacgaccgtcgtgaacaatgcagggattggggttattaaaagcgttgaagacactaccacggaggaatggcgtaaactgctgtccgttaatctggatggtgtttttttcggcacccgtctgggcattcagcgcatgaaaaataaaggcttgggcgctagcatcatcaatatgagcagtattctggggctcgtaggcgatccgtctctgggggcatacaacgcttccaagggggcggtacgtatcatgtcgaaaagcgcagcgctggattgcgcactgaaggactacgatgtgcgtgtcaacacagtacatccgggccccatcaagaccccgcggctcgatgatctggaaggttgggaggaaatgatgtcacagcgtacgttaacccctatgggccacattggcgaaccgaatgacatcgcatggatctgtgtgtacctggcatctgacgaatcgaaatttgcgacgggtgcagaatttgtggtcgacggcgggtggaccgcacag

SEQ ID NO: 64 - protein, 252 aa, Artificial Sequence
  Engineered Variant of Kred from Lactobacillus kefir
MTDRLKHKVAIVTGGTLGIGLAIADKFVEEGAKVVITGRHADVGEKAAKSIGGTDVIRFVQHDASEEAGWTKLFDTTEEAFGPVTTVVNNAGIGVIKSVEDTTTEEWRKLLSVNLDGVFFGTRLGIQRMKNKGLGASIINMSSILGLVGDPSLGAYNASKGAVRIMSKSAALDCALKDYDVRVNTVHPGPIKTPRLDDLEGWEEMMSQRTLTPMGHIGEPNDIAWICVYLASDESKFATGAEFVVDGGWTAQ

SEQ ID NO: 65 - DNA, 756 bp, Artificial Sequence
  Engineered Variant of Kred from Lactobacillus kefir
atgaccgatcgtctgaagcataaagtagccatcattaccggcgggacactgggtatcggtttggcaatcgccgataaatttgtagaggagggtgcgaaagtagttattactggtcgtcacgcggatgtaggtgaaaaggccgccaaatcaatcggcggcactgatgttattcgctttgtccagcacgatgcgtccgaagaagcaggctggacgaaactgttcgacaccaccgaggaggcattcggcccggttacgaccgtcgtgaacaatgcagggattggggttattaaaagcgttgaagacactaccacggaggaatggcgtaaactgctgtccgttaatctggatggtgtttttttcggcacccgtctgggcattcagcgcatgaaaaataaaggcttgggcgctagcatcatcaatatgagcagtattctggggctcgtaggcgatccgacgctgggggcatacaacgcttccaagggggcggtacgtatcatgtcgaaaagcgcagcgctggattgcgcactgaaggactacgatgtgcgtgtcaacacagtacatccgggccccatcaagaccccgcggctcgatgatctggaaggttgggaggaaatgatgtcacagcgtacgttaacccctatgggccacattggcgaaccgaatgacatcgcatggatctgtgtgtacctggcatctgacgaatcgaaatttgcgacgggtgcagaatttgtggtcgacggcgggtggaccgcacag

SEQ ID NO: 66 - protein, 252 aa, Artificial Sequence
  Engineered Variant of Kred from Lactobacillus kefir
MTDRLKHKVAIITGGTLGIGLAIADKFVEEGAKVVITGRHADVGEKAAKSIGGTDVIRFVQHDASEEAGWTKLFDTTEEAFGPVTTVVNNAGIGVIKSVEDTTTEEWRKLLSVNLDGVFFGTRLGIQRMKNKGLGASIINMSSILGLVGDPTLGAYNASKGAVRIMSKSAALDCALKDYDVRVNTVHPGPIKTPRLDDLEGWEEMMSQRTLTPMGHIGEPNDIAWICVYLASDESKFATGAEFVVDGGWTAQ

SEQ ID NO: 67 - DNA, 756 bp, Artificial Sequence
  Engineered Variant of Kred from Lactobacillus kefir
atgaccgatcgtctgaagcataaagtagccatcgtaaccggcgggacactgggtatcggtttggcaatcgccgataaatttgtagaggagggtgcgaaagtagttattactggtcgtcacgcggatgtaggtgaaaaggccgccaaatcaatcggcggcactgatgttattcgctttgtccagcacgatgcgtccgaagaagcaggctggacgaaactgttcgacaccaccgaggaggcattcggcccggttacgaccgtcgtgaacaatgcagggattggggttattgggagcgttgaagacactaccacggaggaatggcgtaaactgctgtccgttaatctggatggtgtttttttcggcacccgtctgggcattcagcgcatgaaaaataaaggcttgggcgctagcatcatcaatatgagcagtattctggggctcgtaggcgatccgacgctgggggcatacaacgcttccaagggggcggtacgtatcatgtcgaaaagcgcagcgctggattgcgcactgaaggactacgatgtgcgtgtcaacacagtacatccgggccccatcaagaccccgcggctcgatgatctggaaggttgggaggaaatgatgtcacagcgtacgttaacccctatgggccacattggcgaaccgaatgacatcgcatggatctgtgtgtacctggcatctgacgaatcgaaatttgcgacgggtgcagaatttgtggtcgacggcgggtggaccgcacag

SEQ ID NO: 68 - protein, 252 aa, Artificial Sequence
  Engineered Variant of Kred from Lactobacillus kefir
MTDRLKHKVAIVTGGTLGIGLAIADKFVEEGAKVVITGRHADVGEKAAKSIGGTDVIRFVQHDASEEAGWTKLFDTTEEAFGPVTTVVNNAGIGVIGSVEDTTTEEWRKLLSVNLDGVFFGTRLGIQRMKNKGLGASIINMSSILGLVGDPTLGAYNASKGAVRIMSKSAALDCALKDYDVRVNTVHPGPIKTPRLDDLEGWEEMMSQRTLTPMGHIGEPNDIAWICVYLASDESKFATGAEFVVDGGWTAQ

SEQ ID NO: 69 - DNA, 756 bp, Artificial Sequence
  Engineered Variant of Kred from Lactobacillus kefir
atgaccgatcgtctgaagcataaagtagccatcgtaaccggcgggacactgggtatcggtttggcaatcgccgataaatttgtagaggagggtgcgaaagtagttattactggtcgtcacgcggatgtaggtgaaaaggccgccaaatcaatcggcggcactgatgttattcgctttgtccagcacgatgcgtccgaagaagcaggctggacgaaactgttcgacaccaccgaggaggcattcggcccggttacgaccttggtgaacaatgcagggattggggttattaaaagcgttgaagacactaccacggaggaatggcgtaaactgctgtccgttaatctggatggtgtttttttcggcacccgtctgggcattcagcgcatgaaaaataaaggcttgggcgctagcatcatcaatatgagcagtattctggggctcgtaggcgatccgacgctgggggcatacaacgcttccaagggggcggtacgtatcatgtcgaaaagcgcagcgctggattgcgcactgaaggactacgatgtgcgtgtcaacacagtacatccgggccccatcaagaccccgcggctcgatgatctggaaggttgggaggaaatgatgtcacagcgtacgttaacccctatgggccacattggcgaaccgaatgacatcgcatggatctgtgtgtacctggcatctgacgaatcgaaatttgcgacgggtgcagaatttgtggtcgacggcgggtggaccgcacag

SEQ ID NO: 70 - protein, 252 aa, Artificial Sequence
  Engineered Variant of Kred from Lactobacillus kefir
MTDRLKHKVAIVTGGTLGIGLAIADKFVEEGAKVVITGRHADVGEKAAKSIGGTDVIRFVQHDASEEAGWTKLFDTTEEAFGPVTTLVNNAGIGVIKSVEDTTTEEWRKLLSVNLDGVFFGTRLGIQRMKNKGLGASIINMSSILGLVGDPTLGAYNASKGAVRIMSKSAALDCALKDYDVRVNTVHPGPIKTPRLDDLEGWEEMMSQRTLTPMGHIGEPNDIAWICVYLASDESKFATGAEFVVDGGWTAQ

SEQ ID NO: 71 - DNA, 756 bp, Artificial Sequence
  Engineered Variant of Kred from Lactobacillus kefir
atgaccgatcgtctgaagcataaagtagccatcattaccggcgggacactgggtatcggtttggcaatcgccgataaatttgtagaggagggtgcgaaagtagttattactggtcgtcacgcggatgtaggtgaaaaggccgccaaatcaatcggcggcactgatgttattcgctttgtccagcacgatgcgtccgaagaagcaggctggacgaaactgttcgacaccaccgaggaggcattcggcccggttacgaccgtcgtgaacaatgcagggattggggttattaaaagcgttgaagacactaccacggaggaatggcgtaaactgctgtccgttaatctggatggtgtttttttcggcacccgtctgggcattcagcgcatgaaaaataaaggcttgggcgctagcatcatcaatatgagcagtattatggggctcgtaggcgatccgactctgggggcatacaacgcttccaagggggcggtacgtatcatgtcgaaaagcgcagcgctggattgcgcactgaaggactacgatgtgcgtgtcaacacagtacatccgggccccatcaagaccccgcggaaggatgatctggaaggttgggaggaaatgatgtcacagcgtacgttaacccctatgggccacattggcgaaccgaatgacatcgcatggatctgtgtgtacctggcatctgacgaatcgaaatttgcgacgggtgcagaatttgtggtcgacggcgggtggaccgcacag

SEQ ID NO: 72 - protein, 252 aa, Artificial Sequence
  Engineered Variant of Kred from Lactobacillus kefir
MTDRLKHKVAIITGGTLGIGLAIADKFVEEGAKVVITGRHADVGEKAAKSIGGTDVIRFVQHDASEEAGWTKLFDTTEEAFGPVTTVVNNAGIGVIKSVEDTTTEEWRKLLSVNLDGVFFGTRLGIQRMKNKGLGASIINMSSIMGLVGDPTLGAYNASKGAVRIMSKSAALDCALKDYDVRVNTVHPGPIKTPRKDDLEGWEEMMSQRTLTPMGHIGEPNDIAWICVYLASDESKFATGAEFVVDGGWTAQ

SEQ ID NO: 73 - DNA, 756 bp, Artificial Sequence
  Engineered Variant of Kred from Lactobacillus kefir
atgaccgatcgtctgaagcataaagtagccatcgtaaccggcgggacactgggtatcggtttggcaatcgccgataaatttgtagaggagggtgcgaaagtagttattactggtcgtcacgcggatgtaggtgaaaaggccgccaaatcaatcggcggcactgatgttattcgctttgtccagcacgatgcgtccgaagaagcaggctggacgaaactgttcgacaccaccgaggaggcattcggcccggttacgaccgtggtgaacaatgcagggattggggttattaaaagcgttgaagacactaccacggaggaatggcgtaaactgctgtccgttaatctggatggtgtttttttcggcacccgtctgggcattcagcgcatgaaaaataaaggcttgggcgctagcatcatcaatatgagcagtattatggggctcgtaggcgatccgacgctgggggcatacaacgcttccaagggggcggtacgtatcatgtcgaaaagcgcagcgctggattgcgcactgaaggactacgatgtgcgtgtcaacacagtacatccgggccccatcaagaccccgcggaaggatgatctggaaggttgggaggaaatgatgtcacagcgtacgttaacccctatgggccacattggcgaaccgaatgacatcgcatggatctgtgtgtacctggcatctgacgaatcgaaatttgcgacgggtgcagaatttgtggtcgacggcgggtggaccgcacag

SEQ ID NO: 74 - protein, 252 aa, Artificial Sequence
  Engineered Variant of Kred from Lactobacillus kefir
MTDRLKHKVAIVTGGTLGIGLAIADKFVEEGAKVVITGRHADVGEKAAKSIGGTDVIRFVQHDASEEAGWTKLFDTTEEAFGPVTTVVNNAGIGVIKSVEDTTTEEWRKLLSVNLDGVFFGTRLGIQRMKNKGLGASIINMSSIMGLVGDPTLGAYNASKGAVRIMSKSAALDCALKDYDVRVNTVHPGPIKTPRKDDLEGWEEMMSQRTLTPMGHIGEPNDIAWICVYLASDESKFATGAEFVVDGGWTAQ

SEQ ID NO: 75 - DNA, 756 bp, Artificial Sequence
  Engineered Variant of Kred from Lactobacillus kefir
atgaccgatcgtctgaagcataaagtagccatcgttaccggcgggacactgggtatcggtttggcaatcgccgataaatttgtagaggagggtgcgaaagtagttattactggtcgtcacgcggatgtaggtgaaaaggccgccaaatcaatcggcggcactgatgttattcgctttgtccagcacgatgcgtccgaagaagcaggctggacgaaactgttcgacaccaccgaggaggcattcggcccggttacgaccctggtgaacaatgcagggattggggttattaaaagcgttgaagacactaccacggaggaatggcgtaaaatcctgtccgttaatctggatggtgtttttttcggcacccgtctgggcattcagcgcatgaaaaataaaggcttgggcgctagcatcatcaatatgagcagtattatggggctcgtaggcgatccgactctgggggcatacaacgcttccaagggggcggtacgtatcatgtcgaaaagcgcagcgctggattgcgcactgaaggactacgatgtgcgtgtcaacacagtacatccgggccccatcaagacccctcggaaagatgatctggaaggttgggaggaaatgatgtcacagcgtacgttaacccctatgggccacattggcgaaccgaatgacatcgcatggatctgtgtgtacctggcatctgacgaatcgaaatttgcgacgggtgcagaatttgtggtcgacggcgggtggaccgcacag

SEQ ID NO: 76 - protein, 252 aa, Artificial Sequence
  Engineered Variant of Kred from Lactobacillus kefir
MTDRLKHKVAIVTGGTLGIGLAIADKFVEEGAKVVITGRHADVGEKAAKSIGGTDVIRFVQHDASEEAGWTKLFDTTEEAFGPVTTLVNNAGIGVIKSVEDTTTEEWRKILSVNLDGVFFGTRLGIQRMKNKGLGASIINMSSIMGLVGDPTLGAYNASKGAVRIMSKSAALDCALKDYDVRVNTVHPGPIKTPRKDDLEGWEEMMSQRTLTPMGHIGEPNDIAWICVYLASDESKFATGAEFVVDGGWTAQ

SEQ ID NO: 77 - DNA, 756 bp, Artificial Sequence
  Engineered Variant of Kred from Lactobacillus kefir
atgaccgatcgtctgaagcataaagtagccatcgttaccggcgggacactgggtatcggtttggcaatcgccgataaatttgtagaggagggtgcgaaagtagttattactggtcgtcacgcggatgtaggtgaaaaggccgccaaatcaatcggcggcactgatgttattcgctttgtccagcacgatgcgtccgaagaagcaggctggacgaaactgttcgacaccaccgaggaggcattcggcccggttacgaccgtcgtgaacaatgcagggattggggttattaaaagcgttgaagacactaccacggaggaatggcgtaaactgctgtccgttaatctggatggtgtttttttcggcacccgtctgggcattcagcgcatgaaaaataaaggcttgggcgctagcatcatcaatatgagcagtattatggggctcgtaggcgatccgggcctgggggcatacaacgcttccaagggggcggtacgtatcatgtcgaaaagcgcagcgctggattgcgcactgaaggactacgatgtgcgtgtcaacacagtacatccgggccccatcaagaccccgcggaaggatgatctggaaggttgggaggaaatgatgtcacagcgtacgttaacccctatgggccacattggcgaaccgaatgacatcgcatggatctgtgtgtacctggcatctgacgaatcgaaatttgcgacgggtgcagaatttgtggtcgacggcgggtggaccgcacag

SEQ ID NO: 78 - protein, 252 aa, Artificial Sequence
  Engineered Variant of Kred from Lactobacillus kefir
MTDRLKHKVAIVTGGTLGIGLAIADKFVEEGAKVVITGRHADVGEKAAKSIGGTDVIRFVQHDASEEAGWTKLFDTTEEAFGPVTTVVNNAGIGVIKSVEDTTTEEWRKLLSVNLDGVFFGTRLGIQRMKNKGLGASIINMSSIMGLVGDPGLGAYNASKGAVRIMSKSAALDCALKDYDVRVNTVHPGPIKTPRKDDLEGWEEMMSQRTLTPMGHIGEPNDIAWICVYLASDESKFATGAEFVVDGGWTAQ

SEQ ID NO: 79 - DNA, 756 bp, Artificial Sequence
  Engineered Variant of Kred from Lactobacillus kefir
atgaccgatcgtctgaagcataaagtagccatcgttaccggcgggacactgggtatcggtttggcaatcgccgataaatttgtagaggagggtgcgaaagtagttattactggtcgtcacgcggatgtaggtgaaaaggccgccaaatcaatcggcggcactgatgttattcgctttgtccagcacgatgcgtccgaagaagcaggctggacgaaactgttcgacaccaccgaggaggcattcggcccggttacgaccctggtgaacaatgcagggattggggttattaaaagcgttgaagacactaccacggaggaatggcgtaaaatcctgtccgttaatctggatggtgtttttttcggcacccgtctgggcattcagcgcatgaaaaataaaggcttgggcgctagcatcatcaatatgagcagtattatggggctcgtaggcgatccgactctgggggcatacaacgcttccaagggggcggtacgtatcatgtcgaaaagcgcagcgctggattgcgcactgaaggactacgatgtgcgtgtcaacacagtacatccgggccccatcaagaccccgcggaaggatgatctggaaggttgggaggaaatgatgtcacagcgtacgttaacccctatgggccacattggcgaaccgaatgacatcgcatggatctgtgtgtacctggcatctgacgaatcgaaatttgcgacgggtgcagaatttgtggtcgacggcgggtggaccgcacag

SEQ ID NO: 80 - protein, 252 aa, Artificial Sequence; identical to SEQ ID NO: 76
  Engineered Variant of Kred from Lactobacillus kefir

SEQ ID NO: 81 - DNA, 756 bp, Artificial Sequence
  Engineered Variant of Kred from Lactobacillus kefir
atgaccgatcgtctgaagcataaagtagccatcattaccggcgggacactgggtatcggtttggcaatcgccgataaatttgtagaggagggtgcgaaagtagttattactggtcgtcacgcggatgtaggtgaaaaggccgccaaatcaatcggcggcactgatgttattcgctttgtccagcacgatgcgtccgaagaagcaggctggacgaaactgttcgacaccaccgaggaggcattcggcccggttacgaccgtggtgaacaatgcagggattggggttattaaaagcgttgaagacactaccacggaggaatggcgtaaaatcctgtccgttaatctggatggtgtttttttcggcacccgtctgggcattcagcgcatgaaaaataaaggcttgggcgctagcatcatcaatatgagcagtattatggggctcgtaggcgatccgggcctgggggcatacaacgcttccaagggggcggtacgtatcatgtcgaaaagcgcagcgctggattgcgcactgaaggactacgatgtgcgtgtcaacacagtacatccgggccccatcaagaccccgcggaaggatgatctggaaggttgggaggaaatgatgtcacagcgtacgttaacccctatgggccacattggcgaaccgaatgacatcgcatggatctgtgtgtacctggcatctgacgaatcgaaatttgcgacgggtgcagaatttgtggtcgacggcgggtggaccgcacag

SEQ ID NO: 82 - protein, 252 aa, Artificial Sequence
  Engineered Variant of Kred from Lactobacillus kefir
MTDRLKHKVAIITGGTLGIGLAIADKFVEEGAKVVITGRHADVGEKAAKSIGGTDVIRFVQHDASEEAGWTKLFDTTEEAFGPVTTVVNNAGIGVIKSVEDTTTEEWRKILSVNLDGVFFGTRLGIQRMKNKGLGASIINMSSIMGLVGDPGLGAYNASKGAVRIMSKSAALDCALKDYDVRVNTVHPGPIKTPRKDDLEGWEEMMSQRTLTPMGHIGEPNDIAWICVYLASDESKFATGAEFVVDGGWTAQ

SEQ ID NO: 83 - DNA, 756 bp, Artificial Sequence
  Engineered Variant of Kred from Lactobacillus kefir
atgaccgatcgtctgaagcataaagtagccatcgttaccggcgggacactgggtatcggtttggcaatcgccgataaatttgtagaggagggtgcgaaagtagttattactggtcgtcacgcggatgtaggtgaaaaggccgccaaatcaatcggcggcactgatgttattcgctttgtccagcacgatgcgtccgaagaagcaggctggacgaaactgttcgacaccaccgaggaggcattcggcccggttacgaccgtggtgaacaatgcagggattggggttattaaaagcgttgaagacactaccacggaggaatggcgtaaaatcctgtccgttaatctggatggtgtttttttcggcacccgtctgggcattcagcgcatgaaaaataaaggcttgggcgctagcatcatcaatatgagcagtattatggggctcgtaggcgatccgactctgggggcatacaacgcttccaagggggcggtacgtatcatgtcgaaaagcgcagcgctggattgcgcactgaaggactacgatgtgcgtgtcaacacagtacatccgggccccatcaagacccatcggaaagatgatctggaaggttgggaggaaatgatgtcacagcgtacgttaacccctatgggccacattggcgaaccgaatgacatcgcatggatctgtgtgtacctggcatctgacgaatcgaaatttgcgacgggtgcagaatttgtggtcgacggcgggtggaccgcacag

SEQ ID NO: 84 - protein, 252 aa, Artificial Sequence
  Engineered Variant of Kred from Lactobacillus kefir
MTDRLKHKVAIVTGGTLGIGLAIADKFVEEGAKVVITGRHADVGEKAAKSIGGTDVIRFVQHDASEEAGWTKLFDTTEEAFGPVTTVVNNAGIGVIKSVEDTTTEEWRKILSVNLDGVFFGTRLGIQRMKNKGLGASIINMSSIMGLVGDPTLGAYNASKGAVRIMSKSAALDCALKDYDVRVNTVHPGPIKTHRKDDLEGWEEMMSQRTLTPMGHIGEPNDIAWICVYLASDESKFATGAEFVVDGGWTAQ

SEQ ID NO: 85 - DNA, 756 bp, Artificial Sequence
  Engineered Variant of Kred from Lactobacillus kefir
atgaccgatcgtctgaagcataaagtagccatcgttaccggcgggacactgggtatcggtttggcaatcgccgataaatttgtagaggagggtgcgaaagtagttattactggtcgtcacgcggatgtaggtgaaaaggccgccaaatcaatcggcggcactgatgttattcgctttgtccagcacgatgcgtccgaagaagcaggctggacgaaactgttcgacaccaccgaggaggcattcggcccggttacgaccgtggtgaacaatgcagggattggggttattaaaagcgttgaagacactaccacggaggaatggcgtaaaatcctgtccgttaatctggatggtgtttttttcggcacccgtctgggcatacagcgcatgaaaaataaaggcttgggcgctagcatcatcaatatgagcagtattatggggctcgtaggcgatccgggcctgggggcatacaacgcttccaagggggcggtacgtatcatgtcgaaaagcgcagcgctggattgcgcactgaaggactacgatgtgcgtgtcaacacagtacatccgggccccatcaagacccctcggaaaggtgatctggaaggttgggaggaaatgatgtcacagcgtacgttaacccctatgggccacattggcgaaccgaatgacatcgcatggatctgtgtgtacctggcatctgacgaatcgaaatttgcgacgggtgcagaatttgtggtcgacggcgggtggaccgcacag

SEQ ID NO: 86 - protein, 252 aa, Artificial Sequence
  Engineered Variant of Kred from Lactobacillus kefir
MTDRLKHKVAIVTGGTLGIGLAIADKFVEEGAKVVITGRHADVGEKAAKSIGGTDVIRFVQHDASEEAGWTKLFDTTEEAFGPVTTVVNNAGIGVIKSVEDTTTEEWRKILSVNLDGVFFGTRLGIQRMKNKGLGASIINMSSIMGLVGDPGLGAYNASKGAVRIMSKSAALDCALKDYDVRVNTVHPGPIKTPRKGDLEGWEEMMSQRTLTPMGHIGEPNDIAWICVYLASDESKFATGAEFVVDGGWTAQ

SEQ ID NO: 87 - DNA, 756 bp, Artificial Sequence
  Engineered Variant of Kred from Lactobacillus kefir
atgaccgatcgtctgaagcataaagtagccatcgtaaccggcgggacactgggtatcggtttggcaatcgccgataaatttgtagaggagggtgcgaaagtagttattactggtcgtcacgcggatgtaggtgaaaaggccgccaaatcaatcggcggcactgatgttattcgctttgtccagcacgatgcgtccgaagaagcaggctggacgaaactgttcgacaccaccgaggaggcattcggcccggttacgaccctggtgaacaatgcagggattggggttattaaaagcgttgaagacactaccacggaggaatggcgtaaaatcctgtccgttaatctggatggtgtttttttcggcacccgtctgggcattcagcgcatgaaaaataaaggcttgggcgctagcatcatcaatatgagcagtattatggggctcgtaggcgatccgactctgggggcatacaacgcttccaagggggcggtacgtatcatgtcgaaaagcgcagcgctggattgcgcactgaaggactacgatgtgcgtgtcaacacagtacatccgggccccatcaagaccaaccggaaagatgatctggaaggttgggaggaaatgatgtcacagcgtacgttaacccctatgggccacattggcgaaccgaatgacatcgcatggatctgtgtgtacctggcatctgacgaatcgaaatttgcgacgggtgcagaatttgtggtcgacggcgggtggaccgcacag

SEQ ID NO: 88 - protein, 252 aa, Artificial Sequence
  Engineered Variant of Kred from Lactobacillus kefir
MTDRLKHKVAIVTGGTLGIGLAIADKFVEEGAKVVITGRHADVGEKAAKSIGGTDVIRFVQHDASEEAGWTKLFDTTEEAFGPVTTLVNNAGIGVIKSVEDTTTEEWRKILSVNLDGVFFGTRLGIQRMKNKGLGASIINMSSIMGLVGDPTLGAYNASKGAVRIMSKSAALDCALKDYDVRVNTVHPGPIKTNRKDDLEGWEEMMSQRTLTPMGHIGEPNDIAWICVYLASDESKFATGAEFVVDGGWTAQ

SEQ ID NO: 89 - DNA, 756 bp, Artificial Sequence
  Engineered Variant of Kred from Lactobacillus kefir
atgaccgatcgtctgaagcataaagtagccatcgttaccggcgggacactgggtatcggtttggcaatcgccgataaatttgtagaggagggtgcgaaagtagttattactggtcgtcacgcggatgtaggtgaaaaggccgccaaatcaatcggcggcactgatgttattcgctttgtccagcacgatgcgtccgaagaagcaggctggacgaaactgttcgacaccaccgaggaggcattcggcccggttacgaccctggtgaacaatgcagggattggggttattaaaagcgttgaagacactaccacggaggaatggcgtaaaatcctgtccgttaatctggatggtgtttttttcggcacccgtctgggcattcagcgcatgaaaaataaaggcttgggcgctagcatcatcaatatgagcagtattatggggctcgtaggcgatccgactctgggggcatacaacgcttccaagggggcggtacgtatcatgtcgaaaagcgcagcgctggattgcgcactgaaggactacgatgtgcgtgtcaacacagtacatccgggccccatcaagacccatcggaaagatgatctggaaggttgggaggaaatgatgtcacagcgtacgttaacgcctatgggccacattggcgaaccgaatgacatcgcatggatctgtgtgtacctggcatctgacgaatcgaaatttgcgacgggtgcagaatttgtggtcgacggcgggtggaccgcacag

SEQ ID NO: 90 - protein, 252 aa, Artificial Sequence
  Engineered Variant of Kred from Lactobacillus kefir
MTDRLKHKVAIVTGGTLGIGLAIADKFVEEGAKVVITGRHADVGEKAAKSIGGTDVIRFVQHDASEEAGWTKLFDTTEEAFGPVTTLVNNAGIGVIKSVEDTTTEEWRKILSVNLDGVFFGTRLGIQRMKNKGLGASIINMSSIMGLVGDPTLGAYNASKGAVRIMSKSAALDCALKDYDVRVNTVHPGPIKTHRKDDLEGWEEMMSQRTLTPMGHIGEPNDIAWICVYLASDESKFATGAEFVVDGGWTAQ

SEQ ID NO: 91 - DNA, 756 bp, Artificial Sequence
  Engineered Variant of Kred from Lactobacillus kefir
atgaccgatcgtctgaagcataaagtagccatcgtaaccggcgggacactgggtatcggtttggcaatcgccgataaatttgtagaggagggtgcgaaagtagttattactggtcgtcacgcggatgtaggtgaaaaggccgccaaatcaatcggcggcactgatgttattcgctttgtccagcacgatgcgtccgaagaagcaggctggacgaaactgttcgacaccaccgaggaggcattcggcccggttacgaccgtcgtgaacaatgcagggattggggttattaaaagcgttgaagacactaccacggaggaatggcgtaaactgctgtccgttaatctggatggtgtttttttcggcacccgtctgggcattcagcgcatgaaaaataaaggcttgggcgctagcatcatcaatatgagcagtattctggggctcgtaggcgatccgagcctgggggcatacaacgcttccaagggggcggtacgtatcatgtcgaaaagcgcagcgctggattgcgcactgaaggactacgatgtgcgtgtcaacacagtacatccgggccccatcaagaccccgcggaaggatgatctggaaggttgggaggaaatgatgtcacagcgtacgttaacccctatgggccacattggcgaaccgaatgacatcgcatggatctgtgtgtacctggcatctgacgaatcgaaatttgcgacgggtgcagaatttgtggtcgacggcgggtggaccgcacag

SEQ ID NO: 92 - protein, 252 aa, Artificial Sequence
  Engineered Variant of Kred from Lactobacillus kefir
MTDRLKHKVAIVTGGTLGIGLAIADKFVEEGAKVVITGRHADVGEKAAKSIGGTDVIRFVQHDASEEAGWTKLFDTTEEAFGPVTTVVNNAGIGVIKSVEDTTTEEWRKLLSVNLDGVFFGTRLGIQRMKNKGLGASIINMSSILGLVGDPSLGAYNASKGAVRIMSKSAALDCALKDYDVRVNTVHPGPIKTPRKDDLEGWEEMMSQRTLTPMGHIGEPNDIAWICVYLASDESKFATGAEFVVDGGWTAQ

SEQ ID NO: 93 - DNA, 756 bp, Artificial Sequence
  Engineered Variant of Kred from Lactobacillus kefir
atgaccgatcgtctgaagcataaagtagccatcgttaccggcgggacactgggtatcggtttggcaatcgccgataaatttgtagaggagggtgcgaaagtagttattactggtcgtcacgcggatgtaggtgaaaaggccgccaaatcaatcggcggcactgatgttattcgctttgtccagcacgatgcgtccgaagaagcaggctggacgaaactgttcgacaccaccgaggaggcattcggcccggttacgaccgtggtgaacaatgcagggattggggttattaaaagcgttgaagacactaccacggaggaatggcgtaaactgctgtccgttaatctggatggtgtttttttcggcacccgtctgggcattcagcgcatgaaaaataaaggcttgggcgctagcatcatcaatatgagcagtattatggggctcgtaggcgatccgactctgggggcatacaacgcttccaagggggcggtacgtatcatgtcgaaaagcgcagcgctggattgcgcactgaaggactacgatgtgcgtgtcaacacagtacatccgggccccatcaagacccctcggaaaggtgatctggaaggttgggaggaaatgatgtcacagcgtacgttaacccctatgggccacattggcgaaccgaatgacatcgcatggctgtgtgtgtacctggcatctgacgaatcgaaatttgcgacgggtgcagaatttgtggtcgacggcgggtggaccgcacag

SEQ ID NO: 94 - protein, 252 aa, Artificial Sequence
  Engineered Variant of Kred from Lactobacillus kefir
MTDRLKHKVAIVTGGTLGIGLAIADKFVEEGAKVVITGRHADVGEKAAKSIGGTDVIRFVQHDASEEAGWTKLFDTTEEAFGPVTTVVNNAGIGVIKSVEDTTTEEWRKLLSVNLDGVFFGTRLGIQRMKNKGLGASIINMSSIMGLVGDPTLGAYNASKGAVRIMSKSAALDCALKDYDVRVNTVHPGPIKTPRKGDLEGWEEMMSQRTLTPMGHIGEPNDIAWLCVYLASDESKFATGAEFVVDGGWTAQ

SEQ ID NO: 95 - DNA, 756 bp, Artificial Sequence
  Engineered Variant of Kred from Lactobacillus kefir
atgaccgatcgtctgaagcataaagtagccatcgttaccggcgggacactgggtatcggtttggcaatcgccgataaatttgtagaggagggtgcgaaagtagttattactggtcgtcacgcggatgtaggtgaaaaggccgccaaatcaatcggcggcactgatgttattcgctttgtccagcacgatgcgtccgaagaagcaggctggacgaaactgttcgacaccaccgaggaggcattcggcccggttacgaccctggtgaacaatgcagggattggggttattaaaagcgttgaagacactaccacggaggaatggcgtaaactgctgtccgttaatctggatggtgtttttttcggcacccgtctgggcattcagcgcatgaaaaataaaggcttgggcgctagcatcatcaatatgagcagtattatggggctcgtaggcgatccgactctgggggcatacaacgcttccaagggggcggtacgtatcatgtcgaaaagcgcagcgctggattgcgcactgaaggactacgatgtgcgtgtcaacacagtacatccgggccccatcaagacccatcggaaagatgatctggaaggttgggaggaaatgatgtcacagcgtacgttaacccctatgggccacattggcgaaccgaatgacatcgcatggatctgtgtgtacctggcatctgacgaatcgaaatttgcgacgggtgcagaatttgtggtcgacggcgggtggaccgcacag

SEQ ID NO: 96 - protein, 252 aa, Artificial Sequence
  Engineered Variant of Kred from Lactobacillus kefir
MTDRLKHKVAIVTGGTLGIGLAIADKFVEEGAKVVITGRHADVGEKAAKSIGGTDVIRFVQHDASEEAGWTKLFDTTEEAFGPVTTLVNNAGIGVIKSVEDTTTEEWRKLLSVNLDGVFFGTRLGIQRMKNKGLGASIINMSSIMGLVGDPTLGAYNASKGAVRIMSKSAALDCALKDYDVRVNTVHPGPIKTHRKDDLEGWEEMMSQRTLTPMGHIGEPNDIAWICVYLASDESKFATGAEFVVDGGWTAQ

SEQ ID NO: 97 - DNA, 756 bp, Artificial Sequence
  Engineered Variant of Kred from Lactobacillus kefir
atgaccgatcgtctgaagcataaagtagccatcgttaccggcgggacactgggtatcggtttggcaatcgccgataaatttgtagaggagggtgcgaaagtagttattactggtcgtcacgcggatgtaggtgaaaaggccgccaaatcaatcggcggcactgatgttattcgctttgtccagcacgatgcgtccgaagaagcaggctggacgaaactgttcgacaccaccgaggaggcattcggcccggttacgaccgtggtgaacaatgcagggattggggttattaaaagcgttgaagacactaccacggaggaatggcgtaaaatcctgtccgttaatctggatggtgtttttttcggcacccgtctgggcattcagcgcatgaaaaataaaggcttgggcgctagcatcatcaatatgagcagtattctggggctcgtaggcgatccgactctgggggcatacaacgcttccaagggggcggtacgtatcatgtcgaaaagcgcagcgctggattgcgcactgaaggactacgatgtgcgtgtcaacacagtacatccgggccccatcaagacccctcggaaagatgatctggaaggttgggaggaaatgatgtcacagcgtacgttaacccctatgggccacattggcgaaccgaatgacatcgcatggatctgtgtgtacctggcatctgacgaatcgaaatttgcgacgggtgcagaatttgtggtcgacggcgggtggaccgcacag

SEQ ID NO: 98 - protein, 252 aa, Artificial Sequence
  Engineered Variant of Kred from Lactobacillus kefir
MTDRLKHKVAIVTGGTLGIGLAIADKFVEEGAKVVITGRHADVGEKAAKSIGGTDVIRFVQHDASEEAGWTKLFDTTEEAFGPVTTVVNNAGIGVIKSVEDTTTEEWRKILSVNLDGVFFGTRLGIQRMKNKGLGASIINMSSILGLVGDPTLGAYNASKGAVRIMSKSAALDCALKDYDVRVNTVHPGPIKTPRKDDLEGWEEMMSQRTLTPMGHIGEPNDIAWICVYLASDESKFATGAEFVVDGGWTAQ

SEQ ID NO: 99 - DNA, 756 bp, Artificial Sequence
  Engineered Variant of Kred from Lactobacillus kefir
atgaccgatcgtctgaagcataaagtagccatcgttaccggcgggacactgggtatcggtttggcaatcgccgataaatttgtagaggagggtgcgaaagtagttattactggtcgtcacgcggatgtaggtgaaaaggccgccaaatcaatcggcggcactgatgttattcgctttgtccagcacgatgcgtccgaagaagcaggctggacgaaactgttcgacaccaccgaggaggcattcggcccggttacgaccctggtgaacaatgcagggattggggttattaaaagcgttgaagacactaccacggaggaatggcgtaaaatcctgtccgttaatctggatggtgtttttttcggcacccgtctgggcattcagcgcatgaaaaataaaggcttgggcgctagcatcatcaatatgagcagtattatggggctcgtaggcgatccgactctgggggcatacaacgcttccaagggggcggtacgtatcatgtcgaaaagcgcagcgctggattgcgcactgaaggactacgatgtgcgtgtcaacacagtacatccgggccccatcaagaccccgcggaaggatgatctggaaggttgggaggaaatgatgtcacagcgtacgcgtacccctatgggccacattggcgaaccgaatgacatcgcatggatctgtgtgtacctggcatctgacgaatcgaaatttgcgacgggtgcagaatttgtggtcgacggcgggtggaccgcacag

SEQ ID NO: 100 - protein, 252 aa, Artificial Sequence
  Engineered Variant of Kred from Lactobacillus kefir
MTDRLKHKVAIVTGGTLGIGLAIADKFVEEGAKVVITGRHADVGEKAAKSIGGTDVIRFVQHDASEEAGWTKLFDTTEEAFGPVTTLVNNAGIGVIKSVEDTTTEEWRKILSVNLDGVFFGTRLGIQRMKNKGLGASIINMSSIMGLVGDPTLGAYNASKGAVRIMSKSAALDCALKDYDVRVNTVHPGPIKTPRKDDLEGWEEMMSQRTRTPMGHIGEPNDIAWICVYLASDESKFATGAEFVVDGGWTAQ

SEQ ID NO: 101 - DNA, 756 bp, Artificial Sequence
  Engineered Variant of Kred from Lactobacillus kefir
atgaccgatcgtctgaagcataaagtagccatcgttaccggcgggacaagtggtatcggtttggcaatcgccgataaatttgtagaggagggtgcgaaagtagttattactggtcgtcacgcggatgtaggtgaaaaggccgccaaatcaatcggcggcactgatgttattcgctttgtccagcacgatgcgtccgaagaagcaggctggacgaaactgttcgacaccaccgaggaggcattcggcccggttacgaccctggtgaacaatgcagggattggggttattaaaagcgttgaagacactaccacggaggaatggcgtaaaatcctgtccgttaatctggatggtgtttttttcggcacccgtctgggcattcagcgcatgaaaaataaaggcttgggcgctagcatcatcaatatgagcagtattatggggctcgtaggcgatccgactctgggggcatacaacgcttccaagggggcggtacgtatcatgtcgaaaagcgcagcgctggattgcgcactgaaggactacgatgtgcgtgtcaacacagtacatccgggccccatcaagaccccgcggaaggatgatctggaaggttgggaggaaatgatgtcacagcgtacgttaacccctatgggccacattggcgaaccgaatgacatcgcatggatctgtgtgtacctggcatctgacgaatcgaaatttgcgacgggtgcagaatttgtggtcgacggcgggtggaccgcacag

SEQ ID NO: 102 - protein, 252 aa, Artificial Sequence
  Engineered Variant of Kred from Lactobacillus kefir
MTDRLKHKVAIVTGGTSGIGLAIADKFVEEGAKVVITGRHADVGEKAAKSIGGTDVIRFVQHDASEEAGWTKLFDTTEEAFGPVTTLVNNAGIGVIKSVEDTTTEEWRKILSVNLDGVFFGTRLGIQRMKNKGLGASIINMSSIMGLVGDPTLGAYNASKGAVRIMSKSAALDCALKDYDVRVNTVHPGPIKTPRKDDLEGWEEMMSQRTLTPMGHIGEPNDIAWICVYLASDESKFATGAEFVVDGGWTAQ

SEQ ID NO: 103 - DNA, 756 bp, Artificial Sequence
  Engineered Variant of Kred from Lactobacillus kefir
atgaccgatcgtctgaagcataaagtagccatcgttaccggcgggacacagggtatcggtttggcaatcgccgataaatttgtagaggagggtgcgaaagtagttattactggtcgtcacgcggatgtaggtgaaaaggccgccaaatcaatcggcggcactgatgttattcgctttgtccagcacgatgcgtccgaagaagcaggctggacgaaactgttcgacaccaccgaggaggcattcggcccggttacgaccctggtgaacaatgcagggattggggttattaaaagcgttgaagacactaccacggaggaatggcgtaaaatcctgtccgttaatctggatggtgtttttttcggcacccgtctgggcattcagcgcatgaaaaataaaggcttgggcgctagcatcatcaatatgagcagtattatggggctcgtaggcgatccgactctgggggcatacaacgcttccaagggggcggtacgtatcatgtcgaaaagcgcagcgctggattgcgcactgaaggactacgatgtgcgtgtcaacacagtacatccgggccccatcaagaccccgcggaaggatgatctggaaggttgggaggaaatgatgtcacagcgtacgttaacccctatgggccacattggcgaaccgaatgacatcgcatggatctgtgtgtacctggcatctgacgaatcgaaatttgcgacgggtgcagaatttgtggtcgacggcgggtggaccgcacag

SEQ ID NO: 104 - protein, 252 aa, Artificial Sequence
  Engineered Variant of Kred from Lactobacillus kefir
MTDRLKHKVAIVTGGTQGIGLAIADKFVEEGAKVVITGRHADVGEKAAKSIGGTDVIRFVQHDASEEAGWTKLFDTTEEAFGPVTTLVNNAGIGVIKSVEDTTTEEWRKILSVNLDGVFFGTRLGIQRMKNKGLGASIINMSSIMGLVGDPTLGAYNASKGAVRIMSKSAALDCALKDYDVRVNTVHPGPIKTPRKDDLEGWEEMMSQRTLTPMGHIGEPNDIAWICVYLASDESKFATGAEFVVDGGWTAQ

SEQ ID NO: 105 - DNA, 756 bp, Artificial Sequence
  Engineered Variant of Kred from Lactobacillus kefir
atgaccgatcgtctgaagcataaagtagccatcgttaccggcgggacactgggtatcggtttggcaatcgccgataaatttgtagaggagggtgcgaaagtagttattactggtcgtcacgcggatgtaggtgaaaaggccgccaaatcaatcggcggcactgatgttattcgctttgtccagcacgatgcgtccgaagaagcaggctggacgaaactgttcgacaccaccgaggaggcattcggcccggttacgaccctggtgaacaatgcagggattggggttattaaaagcgttgaagacactaccacggaggaatggcgtaaaatcctgtccgttaatctggatggtgtttttttcggcacccgtctgggcattcagcgcatgaaaaataaaggcttgggcgctagcatcatcaatatgagcagtattatggggctcgtaggcgatccgactctgggggcatacaacgcttccaagggggcggtacgtatcatgtcgaaaagcgcagcgctggattgcgcactgaaggactacgatgtgcgtgtcaacacagtacatccgggccccatcaagaccccgcggaaggatgctctggaaggttgggaggaaatgatgtcacagcgtacgttaacccctatgggccacattggcgaaccgaatgacatcgcatggatctgtgtgtacctggcatctgacgaatcgaaatttgcgacgggtgcagaatttgtggtcgacggcgggtggaccgcacag

SEQ ID NO: 106 - protein, 252 aa, Artificial Sequence
  Engineered Variant of Kred from Lactobacillus kefir
MTDRLKHKVAIVTGGTLGIGLAIADKFVEEGAKVVITGRHADVGEKAAKSIGGTDVIRFVQHDASEEAGWTKLFDTTEEAFGPVTTLVNNAGIGVIKSVEDTTTEEWRKILSVNLDGVFFGTRLGIQRMKNKGLGASIINMSSIMGLVGDPTLGAYNASKGAVRIMSKSAALDCALKDYDVRVNTVHPGPIKTPRKDALEGWEEMMSQRTLTPMGHIGEPNDIAWICVYLASDESKFATGAEFVVDGGWTAQ

SEQ ID NO: 107 - DNA, 756 bp, Artificial Sequence
  Engineered Variant of Kred from Lactobacillus kefir
atgaccgatcgtctgaagcataaagtagccatcgttaccggcgggacactgggtatcggtttggcaatcgccgataaatttgtagaggagggtgcgaaagtagttattactggtcgtcacgcggatgtaggtgaaaaggccgccaaatcaatcggcggcactgatgttattcgctttgtccagcacgatgcgtccgaagaagcaggctggacgaaactgttcgacaccaccgaggaggcattcggcccggttacgaccctggtgaacaatgcagggattggggttattaaaagcgttgaagacactaccacggaggaatggcgtaaaatcctgtccgttaatctggatggtgtttttttcggcacccgtctgggcattcagcgcatgaaaaataaaggcttgggcgctagcatcatcaatatgagcagtattatggggctcgtaggcgatccgaagctgggggcatacaacgcttccaagggggcggtacgtatcatgtcgaaaagcgcagcgctggattgcgcactgaaggactacgatgtgcgtgtcaacacagtacatccgggccccatcaagaccccgcggaaggatgatctggaaggttgggaggaaatgatgtcacagcgtacgttaacccctatgggccacattggcgaaccgaatgacatcgcatggatctgtgtgtacctggcatctgacgaatcgaaatttgcgacgggtgcagaatttgtggtcgacggcgggtggaccgcacag

SEQ ID NO: 108 - protein, 252 aa, Artificial Sequence
  Engineered Variant of Kred from Lactobacillus kefir
MTDRLKHKVAIVTGGTLGIGLAIADKFVEEGAKVVITGRHADVGEKAAKSIGGTDVIRFVQHDASEEAGWTKLFDTTEEAFGPVTTLVNNAGIGVIKSVEDTTTEEWRKILSVNLDGVFFGTRLGIQRMKNKGLGASIINMSSIMGLVGDPKLGAYNASKGAVRIMSKSAALDCALKDYDVRVNTVHPGPIKTPRKDDLEGWEEMMSQRTLTPMGHIGEPNDIAWICVYLASDESKFATGAEFVVDGGWTAQ

SEQ ID NO: 109 - DNA, 756 bp, Artificial Sequence
  Engineered Variant of Kred from Lactobacillus kefir
atgaccgatcgtctgaagcataaagtagccatcgttaccggcgggacactgggtatcggtttggcaatcgccgataaatttgtagaggagggtgcgaaagtagttattactggtcgtcacgcggatgtaggtgaaaaggccgccaaatcaatcggcggcactgatgttattcgctttgtccagcacgatgcgtccgaagaagcaggctggacgaaactgttcgacaccaccgaggaggcattcggcccggttacgaccctggtgaacaatgcagggattggggttattaaaagcgttgaaacgactaccacggaggaatggcgtaaaatcctgtccgttaatctggatggtgtttttttcggcacccgtctgggcattcagcgcatgaaaaataaaggcttgggcgctagcatcatcaatatgagcagtattatggggctcgtaggcgatccgactctgggggcatacaacgcttccaagggggcggtacgtatcatgtcgaaaagcgcagcgctggattgcgcactgaaggactacgatgtgcgtgtcaacacagtacatccgggccccatcaagaccccgcggaaggatgatctggaaggttgggaggaaatgatgtcacagcgtacgttaacccctatgggccacattggcgaaccgaatgacatcgcatggatctgtgtgtacctggcatctgacgaatcgaaatttgcgacgggtgcagaatttgtggtcgacggcgggtggaccgcacag

SEQ ID NO: 110 - protein, 252 aa, Artificial Sequence
  Engineered Variant of Kred from Lactobacillus kefir
MTDRLKHKVAIVTGGTLGIGLAIADKFVEEGAKVVITGRHADVGEKAAKSIGGTDVIRFVQHDASEEAGWTKLFDTTEEAFGPVTTLVNNAGIGVIKSVETTTTEEWRKILSVNLDGVFFGTRLGIQRMKNKGLGASIINMSSIMGLVGDPTLGAYNASKGAVRIMSKSAALDCALKDYDVRVNTVHPGPIKTPRKDDLEGWEEMMSQRTLTPMGHIGEPNDIAWICVYLASDESKFATGAEFVVDGGWTAQ

SEQ ID NO: 111 - DNA, 756 bp, Artificial Sequence
  Engineered Variant of Kred from Lactobacillus kefir
atgaccgatcgtctgaagcataaagtagccatcgttaccggcgggacactgggtatcggtttggcaatcgccgataaatttgtagaggagggtgcgaaagtagttattactggtcgtcacgcggatgtaggtgaaaaggccgccaaatcaatcggcggcactgatgttattcgctttgtccagcacgatgcgtccgaagaagcaggctggacgaaactgttcgacaccaccgaggaggcattcggcccggttacgaccctggtgaacaatgcagggattggggttattaaaagcgttgaagacactaccacggaggaatggcgtaaagtgctgtccgttaatctggatggtgtttttttcggcacccgtctgggcattcagcgcatgaaaaataaaggcttgggcgctagcatcatcaatatgagcagtattatggggctcgtaggcgatccgactctgggggcatacaacgcttccaagggggcggtacgtatcatgtcgaaaagcgcagcgctggattgcgcactgaaggactacgatgtgcgtgtcaacacagtacatccgggccccatcaagaccccgcggaaggatgatctggaaggttgggaggaaatgatgtcacagcgtacgttaacccctatgggccacattggcgaaccgaatgacatcgcatggatctgtgtgtacctggcatctgacgaatcgaaatttgcgacgggtgcagaatttgtggtcgacggcgggtggaccgcacag

SEQ ID NO: 112 - protein, 252 aa, Artificial Sequence
  Engineered Variant of Kred from Lactobacillus kefir
MTDRLKHKVAIVTGGTLGIGLAIADKFVEEGAKVVITGRHADVGEKAAKSIGGTDVIRFVQHDASEEAGWTKLFDTTEEAFGPVTTLVNNAGIGVIKSVEDTTTEEWRKVLSVNLDGVFFGTRLGIQRMKNKGLGASIINMSSIMGLVGDPTLGAYNASKGAVRIMSKSAALDCALKDYDVRVNTVHPGPIKTPRKDDLEGWEEMMSQRTLTPMGHIGEPNDIAWICVYLASDESKFATGAEFVVDGGWTAQ

SEQ ID NO: 113 - DNA, 756 bp, Artificial Sequence
  Engineered Variant of Kred from Lactobacillus kefir
atgaccgatcgtctgaagcataaagtagccatcgttaccggcgggacactgggtatcggtttggcaatcgccgataaatttgtagaggagggtgcgaaagtagttattactggtcgtcacgcggatgtaggtgaaaaggccgccaaatcaatcggcggcactgatgttattcgctttgtccagcacgatgcgtccgaagaagcaggctggacgaaactgttcgacaccaccgaggaggcattcggcccggttacgaccctggtgaacaatgcagggattggggttattaaaagcgttgaatgtactaccacggaggaatggcgtaaaatcctgtccgttaatctggatggtgtttttttcggcacccgtctgggcattcagcgcatgaaaaataaaggcttgggcgctagcatcatcaatatgagcagtattatggggctcgtaggcgatccgactctgggggcatacaacgcttccaagggggcggtacgtatcatgtcgaaaagcgcagcgctggattgcgcactgaaggactacgatgtgcgtgtcaacacagtacatccgggccccatcaagaccccgcggaaggatgatctggaaggttgggaggaaatgatgtcacagcgtacgttaacccctatgggccacattggcgaaccgaatgacatcgcatggatctgtgtgtacctggcatctgacgaatcgaaatttgcgacgggtgcagaatttgtggtcgacggcgggtggaccgcacag

SEQ ID NO: 114 - protein, 252 aa, Artificial Sequence
  Engineered Variant of Kred from Lactobacillus kefir
MTDRLKHKVAIVTGGTLGIGLAIADKFVEEGAKVVITGRHADVGEKAAKSIGGTDVIRFVQHDASEEAGWTKLFDTTEEAFGPVTTLVNNAGIGVIKSVECTTTEEWRKILSVNLDGVFFGTRLGIQRMKNKGLGASIINMSSIMGLVGDPTLGAYNASKGAVRIMSKSAALDCALKDYDVRVNTVHPGPIKTPRKDDLEGWEEMMSQRTLTPMGHIGEPNDIAWICVYLASDESKFATGAEFVVDGGWTAQ

SEQ ID NO: 115 - DNA, 756 bp, Artificial Sequence
  Engineered Variant of Kred from Lactobacillus kefir
atgaccgatcgtctgaagcataaagtagccatcgttaccggcgggacactgggtatcggtttggcaatcgccgataaatttgtagaggagggtgcgaaagtagttattactggtcgtcacgcggatgtaggtgaaaaggccgccaaatcaatcggcggcactgatgttattcgctttgtccagcacgatgcgtccgaagaagcaggctggacgaaactgttcgacaccaccgaggaggcattcggcccggttacgaccctggtgaacaatgcagggattggggttattaaaagcgttgaagacactaccacggaggaatggcgtaaaatcctgtccgttaatctggatggtgtttttttcggcacccgtctgggcattcagcgcatgaaaaataaaggcttgggcgctagcatcatcaatatgagcagtattatggggctcgtaggcgatccgactctgggggcatacaacgcttccaagggggcggtacgtatcatgtcgaaaagcgcagcgctggattgcgcactgaaggactacgatgtgcgtgtcaacacagtacatccgggcgcgatcaagaccccgcggaaggatgatctggaaggttgggaggaaatgatgtcacagcgtacgttaacccctatgggccacattggcgaaccgaatgacatcgcatggatctgtgtgtacctggcatctgacgaatcgaaatttgcgacgggtgcagaatttgtggtcgacggcgggtggaccgcacag

SEQ ID NO: 116 - protein, 252 aa, Artificial Sequence
  Engineered Variant of Kred from Lactobacillus kefir
MTDRLKHKVAIVTGGTLGIGLAIADKFVEEGAKVVITGRHADVGEKAAKSIGGTDVIRFVQHDASEEAGWTKLFDTTEEAFGPVTTLVNNAGIGVIKSVEDTTTEEWRKILSVNLDGVFFGTRLGIQRMKNKGLGASIINMSSIMGLVGDPTLGAYNASKGAVRIMSKSAALDCALKDYDVRVNTVHPGAIKTPRKDDLEGWEEMMSQRTLTPMGHIGEPNDIAWICVYLASDESKFATGAEFVVDGGWTAQ

SEQ ID NO: 117 - DNA, 756 bp, Artificial Sequence
  Engineered Variant of Kred from Lactobacillus kefir
atgaccgatcgtctgaagcataaagtagccatcgttaccggcgggacactgggtatcggtttggcaatcgccgataaatttgtagaggagggtgcgaaagtagttattactggtcgtcacgcggatgtaggtgaaaaggccgccaaatcaatcggcggcactgattgtattcgctttgtccagcacgatgcgtccgaagaagcaggctggacgaaactgttcgacaccaccgaggaggcattcggcccggttacgaccctggtgaacaatgcagggattggggttattaaaagcgttgaagacactaccacggaggaatggcgtaaaatcctgtccgttaatctggatggtgtttttttcggcacccgtctgggcattcagcgcatgaaaaataaaggcttgggcgctagcatcatcaatatgagcagtattatggggctcgtaggcgatccgactctgggggcatacaacgcttccaagggggcggtacgtatcatgtcgaaaagcgcagcgctggattgcgcactgaaggactacgatgtgcgtgtcaacacagtacatccgggccccatcaagaccccgcggaaggatgatctggaaggttgggaggaaatgatgtcacagcgtacgttaacccctatgggccacattggcgaaccgaatgacatcgcatggatctgtgtgtacctggcatctgacgaatcgaaatttgcgacgggtgcagaatttgtggtcgacggcgggtggaccgcacag

SEQ ID NO: 118 - protein, 252 aa, Artificial Sequence
  Engineered Variant of Kred from Lactobacillus kefir
MTDRLKHKVAIVTGGTLGIGLAIADKFVEEGAKVVITGRHADVGEKAAKSIGGTDCIRFVQHDASEEAGWTKLFDTTEEAFGPVTTLVNNAGIGVIKSVEDTTTEEWRKILSVNLDGVFFGTRLGIQRMKNKGLGASIINMSSIMGLVGDPTLGAYNASKGAVRIMSKSAALDCALKDYDVRVNTVHPGPIKTPRKDDLEGWEEMMSQRTLTPMGHIGEPNDIAWICVYLASDESKFATGAEFVVDGGWTAQ

SEQ ID NO: 119 - DNA, 756 bp, Artificial Sequence
  Engineered Variant of Kred from Lactobacillus kefir
atgaccgatcgtctgaagcataaagtagccatcgttaccggcgggacactgggtatcggtttggcaatcgccgataaatttgtagaggagggtgcgaaagtagttattactggtcgtcacgcggatgtaggtgaaaaggccgccaaatcaatcggcggcactgatgttattcgctttgtccagcacgatgcgtccgaagaagcaggctggacgaaactgttcgacaccaccgaggaggcattcggcccggttacgaccctggtgaacaatgcagggattggggttattaaaagcgttgaagacactaccacggaggaatggcgtaaaatcctgtccgttaatctggatggtgtttttttcggcacccgtctgggcattcagcgcatgaaaaataaaggcttgggcgctagcatcatcaatatgagcagtattatggggctcgtaggcgatccgactctgggggcatacaacgcttccaaggggggtgtacgtatcatgtcgaaaagcgcagcgctggattgcgcactgaaggactacgatgtgcgtgtcaacacagtacatccgggccccatcaagaccccgcggaaggatgatctggaaggttgggaggaaatgatgtcacagcgtacgttaacccctatgggccacattggcgaaccgaatgacatcgcatggatctgtgtgtacctggcatctgacgaatcgaaatttgcgacgggtgcagaatttgtggtcgacggcgggtggaccgcacag

SEQ ID NO: 120 - protein, 252 aa, Artificial Sequence
  Engineered Variant of Kred from Lactobacillus kefir
MTDRLKHKVAIVTGGTLGIGLAIADKFVEEGAKVVITGRHADVGEKAAKSIGGTDVIRFVQHDASEEAGWTKLFDTTEEAFGPVTTLVNNAGIGVIKSVEDTTTEEWRKILSVNLDGVFFGTRLGIQRMKNKGLGASIINMSSIMGLVGDPTLGAYNASKGGVRIMSKSAALDCALKDYDVRVNTVHPGPIKTPRKDDLEGWEEMMSQRTLTPMGHIGEPNDIAWICVYLASDESKFATGAEFVVDGGWTAQ

SEQ ID NO: 121 - DNA, 756 bp, Artificial Sequence
  Engineered Variant of Kred from Lactobacillus kefir
atgaccgatcgtctgaagcataaagtagccatcgttaccggcgggacactgggtatcggtttggcaatcgccgataaatttgtagaggagggtgcgaaagtagttattactggtcgtcacgcggatgtaggtgaaaaggccgccaaatcaatcggcggcactgatgttattcgctttgtccagcacgatgcgtccgaagaagcaggctggacgaaactgttcgacaccaccgaggaggcattcggcccggttacgaccctggtgaacaatgcagggattgggattattaaaagcgttgaagacactaccacggaggaatggcgtaaaatcctgtccgttaatctggatggtgtttttttcggcacccgtctgggcattcagcgcatgaaaaataaaggcttgggcgctagcatcatcaatatgagcagtattatggggctcgtaggcgatccgactctgggggcatacaacgcttccaagggggcggtacgtatcatgtcgaaaagcgcagcgctggattgcgcactgaaggactacgatgtgcgtgtcaacacagtacatccgggccccatcaagaccccgcggaaggatgatctggaaggttgggaggaaatgatgtcacagcgtacgttaacccctatgggccacattggcgaaccgaatgacatcgcatggatctgtgtgtacctggcatctgacgaatcgaaatttgcgacgggtgcagaatttgtggtcgacggcgggtggaccgcacag

SEQ ID NO: 122 - protein, 252 aa, Artificial Sequence
  Engineered Variant of Kred from Lactobacillus kefir
MTDRLKHKVAIVTGGTLGIGLAIADKFVEEGAKVVITGRHADVGEKAAKSIGGTDVIRFVQHDASEEAGWTKLFDTTEEAFGPVTTLVNNAGIGIIKSVEDTTTEEWRKILSVNLDGVFFGTRLGIQRMKNKGLGASIINMSSIMGLVGDPTLGAYNASKGAVRIMSKSAALDCALKDYDVRVNTVHPGPIKTPRKDDLEGWEEMMSQRTLTPMGHIGEPNDIAWICVYLASDESKFATGAEFVVDGGWTAQ

SEQ ID NO: 123 - DNA, 756 bp, Artificial Sequence
  Engineered Variant of Kred from Lactobacillus kefir
atgaccgatcgtctgaagcataaagtagccatcgttaccggcgggacactgggtatcggtttggcaatcgccgataaatttgtagaggagggtgcgaaagtagttattactggtcgtcacgcggatgtaggtgaaaaggccgccaaatcaatcggcggcactgatgttattcgctttgtccagcacgatgcgtccgaagaagcaggctggacgaaactgttcgacaccaccgaggaggcattcggcccggttacgaccctggtgaacaatgcagggattggggttattaaaagcgttgaagacactaccacggaggaatggcgtaaaatcctgtccgttaatctggatggtgtttttttcggcacccgtctgggcattcagcgcatgaaaaataaaggcttgggcgctagcatcatcaatatgagcagtattatggggctcgtaggcgatccgactctgggggcatacaacgcttccaagggggcggtacgtatcatgtcgaaaagcgcagcgctggattgcgcactgaaggactacgatgtgcgtgtcaacacagtacatccgggccccatcaagaccccgcggaaggatgatctggaaggttgggaggaaatgatgtcacagcgttggttaacccctatgggccacattggcgaaccgaatgacatcgcatggatctgtgtgtacctggcatctgacgaatcgaaatttgcgacgggtgcagaatttgtggtcgacggcgggtggaccgcacag

SEQ ID NO: 124 - protein, 252 aa, Artificial Sequence
  Engineered Variant of Kred from Lactobacillus kefir
MTDRLKHKVAIVTGGTLGIGLAIADKFVEEGAKVVITGRHADVGEKAAKSIGGTDVIRFVQHDASEEAGWTKLFDTTEEAFGPVTTLVNNAGIGVIKSVEDTTTEEWRKILSVNLDGVFFGTRLGIQRMKNKGLGASIINMSSIMGLVGDPTLGAYNASKGAVRIMSKSAALDCALKDYDVRVNTVHPGPIKTPRKDDLEGWEEMMSQRWLTPMGHIGEPNDIAWICVYLASDESKFATGAEFVVDGGWTAQ

SEQ ID NO: 125 - DNA, 756 bp, Artificial Sequence
  Engineered Variant of Kred from Lactobacillus kefir
atgaccgatcgtctgaagcataaagtagccatcgttaccggcgggacactgggtatcggtttggcaatcgccgataaatttgtagaggagggtgcgaaagtagttattactggtcgtcacgcggatgtaggtgaaaaggccgccaaatcaatcggcggcactgatgttattcgctttgtccagcacgatgcgtccgaagaagcaggctggacgaaactgttcgacaccaccgaggaggcattcggcccggttacgaccctggtgaacaatgcagggattggggttattaaaagcgttgaagacactaccacggaggaatggcgtaaaatcctgtccgttaatctggatggtgtttttttcggcacccgtctgggcattcagcgcatgaaaaataaaggcttgggcgctagcatcatcaatatgagcagtattatggggctcgtaggcgatccgactctgggggcatacaacgcttccaagggggcggtacgtatcatgtcgaaaagcgcagcgctggattgcgcactgaaggactacgatgtgcgtgtcaacacagtacatccgggccccatcaagaccccgcggaaggatgatctggaaggttgggaggaaatgatgtcacagcgttttttaacccctatgggccacattggcgaaccgaatgacatcgcatggatctgtgtgtacctggcatctgacgaatcgaaatttgcgacgggtgcagaatttgtggtcgacggcgggtggaccgcacag

SEQ ID NO: 126 - protein, 252 aa, Artificial Sequence
  Engineered Variant of Kred from Lactobacillus kefir
MTDRLKHKVAIVTGGTLGIGLAIADKFVEEGAKVVITGRHADVGEKAAKSIGGTDVIRFVQHDASEEAGWTKLFDTTEEAFGPVTTLVNNAGIGVIKSVEDTTTEEWRKILSVNLDGVFFGTRLGIQRMKNKGLGASIINMSSIMGLVGDPTLGAYNASKGAVRIMSKSAALDCALKDYDVRVNTVHPGPIKTPRKDDLEGWEEMMSQRFLTPMGHIGEPNDIAWICVYLASDESKFATGAEFVVDGGWTAQ

SEQ ID NO: 127 - DNA, 756 bp, Artificial Sequence
  Engineered Variant of Kred from Lactobacillus kefir
atgaccgatcgtctgaagcataaagtagccatcgttaccggcgggacactgggtatcggtgctgcaatcgccgataaatttgtagaggagggtgcgaaagtagttattactggtcgtcacgcggatgtaggtgaaaaggccgccaaatcaatcggcggcactgatgttattcgctttgtccagcacgatgcgtccgaagaagcaggctggacgaaactgttcgacaccaccgaggaggcattcggcccggttacgaccctggtgaacaatgcagggattggggttattaaaagcgttgaagacactaccacggaggaatggcgtaaaatcctgtccgttaatctggatggtgtttttttcggcacccgtctgggcattcagcgcatgaaaaataaaggcttgggcgctagcatcatcaatatgagcagtattatggggctcgtaggcgatccgactctgggggcatacaacgcttccaagggggcggtacgtatcatgtcgaaaagcgcagcgctggattgcgcactgaaggactacgatgtgcgtgtcaacacagtacatccgggccccatcaagaccccgcggaaggatgatctggaaggttgggaggaaatgatgtcacagcgtacgttaacccctatgggccacattggcgaaccgaatgacatcgcatggatctgtgtgtacctggcatctgacgaatcgaaatttgcgacgggtgcagaatttgtggtcgacggcgggtggaccgcacag

SEQ ID NO: 128 - protein, 252 aa, Artificial Sequence
  Engineered Variant of Kred from Lactobacillus kefir
MTDRLKHKVAIVTGGTLGIGAAIADKFVEEGAKVVITGRHADVGEKAAKSIGGTDVIRFVQHDASEEAGWTKLFDTTEEAFGPVTTLVNNAGIGVIKSVEDTTTEEWRKILSVNLDGVFFGTRLGIQRMKNKGLGASIINMSSIMGLVGDPTLGAYNASKGAVRIMSKSAALDCALKDYDVRVNTVHPGPIKTPRKDDLEGWEEMMSQRTLTPMGHIGEPNDIAWICVYLASDESKFATGAEFVVDGGWTAQ

SEQ ID NO: 129 - DNA, 756 bp, Artificial Sequence
  Engineered Variant of Kred from Lactobacillus kefir
atgaccgatcgtctgaagcataaagtagccatcgttaccggcgggacactgggtatcggtttggcaatcgccgataaatttgtagaggagggtgcgaaagtagttattactggtcgtcacgcggatgtaggtgaaaaggccgccaaatcaatcggcggcactgatgttattcgctttgtccagcacgatgcgtccgaagaagcaggctggacgaaactgttcgacaccaccgaggaggcattcggcccggttacgaccctggtgaacaatgcagggattggggttattaaaagcgttgaagacactaccacggaggaatggcgtaaaatcctgtccgttaatctggatggtgtttttttcggcacccgtctgggcattcagcgcatgaaaaataaaggcttgggcgctagcatcatcaatatgagcagtattatggggctcgtaggcgatccgactctgggggcatacaacgcttccaagggggcggtacgtatcatgtcgaaaagcgcagcgctggattgcgcactgaaggactacgatgtgcgtgtcaacacagtacatccgggccccatcaagaccccgcggaaggatgatctggaaggttgggaggaaatgatgtcacagcgtacgttaacccctatgggccacattggcgaaccgaatgacatcgcatggatcgttgtgtacctggcatctgacgaatcgaaatttgcgacgggtgcagaatttgtggtcgacggcgggtggaccgcacag

SEQ ID NO: 130 - protein, 252 aa, Artificial Sequence
  Engineered Variant of Kred from Lactobacillus kefir
MTDRLKHKVAIVTGGTLGIGLAIADKFVEEGAKVVITGRHADVGEKAAKSIGGTDVIRFVQHDASEEAGWTKLFDTTEEAFGPVTTLVNNAGIGVIKSVEDTTTEEWRKILSVNLDGVFFGTRLGIQRMKNKGLGASIINMSSIMGLVGDPTLGAYNASKGAVRIMSKSAALDCALKDYDVRVNTVHPGPIKTPRKDDLEGWEEMMSQRTLTPMGHIGEPNDIAWIVVYLASDESKFATGAEFVVDGGWTAQ

SEQ ID NO: 131 - DNA, 756 bp, Artificial Sequence
  Engineered Variant of Kred from Lactobacillus kefir
atgaccgatcgtctgaagcataaagtagccatcgttaccggcgggacactgggtatcggtttggcaatcgccgataaatttgtagaggagggtgcgaaagtagttattactggtcgtcacgcggatgtaggtgaagtggccgccaaatcaatcggcggcactgatgttattcgctttgtccagcacgatgcgtccgaagaagcaggctggacgaaactgttcgacaccaccgaggaggcattcggcccggttacgaccctggtgaacaatgcagggattggggttattaaaagcgttgaagacactaccacggaggaatggcgtaaaatcctgtccgttaatctggatggtgtttttttcggcacccgtctgggcattcagcgcatgaaaaataaaggcttgggcgctagcatcatcaatatgagcagtattatggggctcgtaggcgatccgactctgggggcatacaacgcttccaagggggcggtacgtatcatgtcgaaaagcgcagcgctggattgcgcactgaaggactacgatgtgcgtgtcaacacagtacatccgggccccatcaagaccccgcggaaggatgatctggaaggttgggaggaaatgatgtcacagcgtacgttaacccctatgggccacattggcgaaccgaatgacatcgcatggatctgtgtgtacctggcatctgacgaatcgaaatttgcgacgggtgcagaatttgtggtcgacggcgggtggaccgcacag

SEQ ID NO: 132 - protein, 252 aa, Artificial Sequence
  Engineered Variant of Kred from Lactobacillus kefir
MTDRLKHKVAIVTGGTLGIGLAIADKFVEEGAKVVITGRHADVGEVAAKSIGGTDVIRFVQHDASEEAGWTKLFDTTEEAFGPVTTLVNNAGIGVIKSVEDTTTEEWRKILSVNLDGVFFGTRLGIQRMKNKGLGASIINMSSIMGLVGDPTLGAYNASKGAVRIMSKSAALDCALKDYDVRVNTVHPGPIKTPRKDDLEGWEEMMSQRTLTPMGHIGEPNDIAWICVYLASDESKFATGAEFVVDGGWTAQ

SEQ ID NO: 133 - DNA, 756 bp, Artificial Sequence
  Engineered Variant of Kred from Lactobacillus kefir
atgaccgatcgtctgaagcataaagtagccatcgttaccggcgggacactgggtatcggtttggcaatcgccgataaatttgtagaggagggtgcgaaagtagttattactggtcgtcacgcggatgtaggtgaaaaggccgccaaatcaatcggcggcactgatgttattcgctttgtccagcacgatgcgtccgaagaagcaggctggacgaaactgttcgacaccaccgaggaggcattcggcccggttacgaccctggtgaacaatgcagggattggggttattaaaagcgttgaactgactaccacggaggaatggcgtaaaatcctgtccgttaatctggatggtgtttttttcggcacccgtctgggcattcagcgcatgaaaaataaaggcttgggcgctagcatcatcaatatgagcagtattatggggctcgtaggcgatccgactctgggggcatacaacgcttccaagggggcggtacgtatcatgtcgaaaagcgcagcgctggattgcgcactgaaggactacgatgtgcgtgtcaacacagtacatccgggccccatcaagaccccgcggaaggatgatctggaaggttgggaggaaatgatgtcacagcgtacgttaacccctatgggccacattggcgaaccgaatgacatcgcatggatctgtgtgtacctggcatctgacgaatcgaaatttgcgacgggtgcagaatttgtggtcgacggcgggtggaccgcacag

SEQ ID NO: 134 - protein, 252 aa, Artificial Sequence
  Engineered Variant of Kred from Lactobacillus kefir
MTDRLKHKVAIVTGGTLGIGLAIADKFVEEGAKVVITGRHADVGEKAAKSIGGTDVIRFVQHDASEEAGWTKLFDTTEEAFGPVTTLVNNAGIGVIKSVELTTTEEWRKILSVNLDGVFFGTRLGIQRMKNKGLGASIINMSSIMGLVGDPTLGAYNASKGAVRIMSKSAALDCALKDYDVRVNTVHPGPIKTPRKDDLEGWEEMMSQRTLTPMGHIGEPNDIAWICVYLASDESKFATGAEFVVDGGWTAQ

SEQ ID NO: 135 - DNA, 756 bp, Artificial Sequence
  Engineered Variant of Kred from Lactobacillus kefir
atgaccgatcgtctgaagcataaagtagccatcgttaccggcgggacactgggtatcggtttggcaatcgccgataaatttgtagaggagggtgcgaaagtagttattactggtcgtcacgcggatgtaggtgaaaaggccgccaaatcaatcggcggcactgatgttattcgctttgtccagcacgatgcgtccgaagaagcaggctggacgaaactgttcgacaccaccgaggaggcattcggcccggttacgaccctggtgaacaatgcagggattggggttattaaaagcgttgaagacactaccacggaggaatggcgtaaaatcctgtccgttaatctggatggtgtttttttcggcacccgtctgggcattcagcgcatgaaaaataaaggcttgggcgctagcatcatcaatatgagcagtattatggggctcgtaggcgatccgactctgggggcatacaacgcttccaagggggcggtacgtatcatgtcgaaaagcgcagcgctggattgcgcactgaaggactacgatgtgcgtgtcaacacagtacatccgggccccatcaagaccccgcggaaggatcagctggaaggttgggaggaaatgatgtcacagcgtacgttaacccctatgggccacattggcgaaccgaatgacatcgcatggatctgtgtgtacctggcatctgacgaatcgaaatttgcgacgggtgcagaatttgtggtcgacggcgggtggaccgcacag

SEQ ID NO: 136 - protein, 252 aa, Artificial Sequence
  Engineered Variant of Kred from Lactobacillus kefir
MTDRLKHKVAIVTGGTLGIGLAIADKFVEEGAKVVITGRHADVGEKAAKSIGGTDVIRFVQHDASEEAGWTKLFDTTEEAFGPVTTLVNNAGIGVIKSVEDTTTEEWRKILSVNLDGVFFGTRLGIQRMKNKGLGASIINMSSIMGLVGDPTLGAYNASKGAVRIMSKSAALDCALKDYDVRVNTVHPGPIKTPRKDQLEGWEEMMSQRTLTPMGHIGEPNDIAWICVYLASDESKFATGAEFVVDGGWTAQ

SEQ ID NO: 137 - DNA, 756 bp, Artificial Sequence
  Engineered Variant of Kred from Lactobacillus kefir
atgaccgatcgtctgaagcataaagtagccatcgttaccggcgggacactgggtatcggtttggcaatcgccgataaatttgtagaggagggtgcgaaagtagttattactggtcgtcacgcggatgtaggtgaaaaggccgccaaatcaatcggcggcactgatgttattcgctttgtccagcacgatgcgtccgaagaagcaggctggacgaaactgttcgacaccaccgaggaggcattcggcccggttacgaccctggtgaacaatgcagggattggggttattaaaagcgttgaagacactaccacggaggaatggcgtaaaatcctgtccgttaatctggatggtgtttttttcggcacccgtctgggcattcagcgcatgaaaaataaaggcttgggcgctagcatcatcaatatgagcagtattatggggctcgtaggcgatccgttgctgggggcatacaacgcttccaagggggcggtacgtatcatgtcgaaaagcgcagcgctggattgcgcactgaaggactacgatgtgcgtgtcaacacagtacatccgggccccatcaagaccccgcggaaggatgatctggaaggttgggaggaaatgatgtcacagcgtacgttaacccctatgggccacattggcgaaccgaatgacatcgcatggatctgtgtgtacctggcatctgacgaatcgaaatttgcgacgggtgcagaatttgtggtcgacggcgggtggaccgcacag

SEQ ID NO: 138 - protein, 252 aa, Artificial Sequence
  Engineered Variant of Kred from Lactobacillus kefir
MTDRLKHKVAIVTGGTLGIGLAIADKFVEEGAKVVITGRHADVGEKAAKSIGGTDVIRFVQHDASEEAGWTKLFDTTEEAFGPVTTLVNNAGIGVIKSVEDTTTEEWRKILSVNLDGVFFGTRLGIQRMKNKGLGASIINMSSIMGLVGDPLLGAYNASKGAVRIMSKSAALDCALKDYDVRVNTVHPGPIKTPRKDDLEGWEEMMSQRTLTPMGHIGEPNDIAWICVYLASDESKFATGAEFVVDGGWTAQ

SEQ ID NO: 139 - DNA, 756 bp, Artificial Sequence
  Engineered Variant of Kred from Lactobacillus kefir
atgaccgatcgtctgaagcataaagtagccatcgttaccggcgggacactgggtatcggtttggcaatcgccgataaatttgtagaggagggtgcgaaagtagttattactggtcgtcacgcggatgtaggtgaaaaggccgccaaatcaatcggcggcactgatgttattcgctttgtccagcacgatgcgtccgaagaagcaggctggacgaaactgttcgacaccaccgagttggcattcggcccggttacgaccctggtgaacaatgcagggattggggttattaaaagcgttgaagacactaccacggaggaatggcgtaaaatcctgtccgttaatctggatggtgtttttttcggcacccgtctgggcattcagcgcatgaaaaataaaggcttgggcgctagcatcatcaatatgagcagtattatggggctcgtaggcgatccgactctgggggcatacaacgcttccaagggggcggtacgtatcatgtcgaaaagcgcagcgctggattgcgcactgaaggactacgatgtgcgtgtcaacacagtacatccgggccccatcaagaccccgcggaaggatgatctggaaggttgggaggaaatgatgtcacagcgtacgttaacccctatgggccacattggcgaaccgaatgacatcgcatggatctgtgtgtacctggcatctgacgaatcgaaatttgcgacgggtgcagaatttgtggtcgacggcgggtggaccgcacag

SEQ ID NO: 140 - protein, 252 aa, Artificial Sequence
  Engineered Variant of Kred from Lactobacillus kefir
MTDRLKHKVAIVTGGTLGIGLAIADKFVEEGAKVVITGRHADVGEKAAKSIGGTDVIRFVQHDASEEAGWTKLFDTTELAFGPVTTLVNNAGIGVIKSVEDTTTEEWRKILSVNLDGVFFGTRLGIQRMKNKGLGASIINMSSIMGLVGDPTLGAYNASKGAVRIMSKSAALDCALKDYDVRVNTVHPGPIKTPRKDDLEGWEEMMSQRTLTPMGHIGEPNDIAWICVYLASDESKFATGAEFVVDGGWTAQ

SEQ ID NO: 141 - DNA, 756 bp, Artificial Sequence
  Engineered Variant of Kred from Lactobacillus kefir
atgaccgatcgtctgaagcataaagtagccatcgttaccggcgggacactgggtatcggtttggcaatcgccgataaatttgtagaggagggtgcgaaagtagttattactggtcgtcacgcggatgtaggtgaaaaggccgccaaatcaatcggcggcactgatgttattcgctttgtccagcacgatgcgtccgaagaagcaggctggacggcgctgttcgacaccaccgaggaggcattcggcccggttacgaccctggtgaacaatgcagggattggggttattaaaagcgttgaagacactaccacggaggaatggcgtaaaatcctgtccgttaatctggatggtgtttttttcggcacccgtctgggcattcagcgcatgaaaaataaaggcttgggcgctagcatcatcaatatgagcagtattatggggctcgtaggcgatccgactctgggggcatacaacgcttccaagggggcggtacgtatcatgtcgaaaagcgcagcgctggattgcgcactgaaggactacgatgtgcgtgtcaacacagtacatccgggccccatcaagaccccgcggaaggatgatctggaaggttgggaggaaatgatgtcacagcgtacgttaacccctatgggccacattggcgaaccgaatgacatcgcatggatctgtgtgtacctggcatctgacgaatcgaaatttgcgacgggtgcagaatttgtggtcgacggcgggtggaccgcacag

SEQ ID NO: 142 - protein, 252 aa, Artificial Sequence
  Engineered Variant of Kred from Lactobacillus kefir
MTDRLKHKVAIVTGGTLGIGLAIADKFVEEGAKVVITGRHADVGEKAAKSIGGTDVIRFVQHDASEEAGWTALFDTTEEAFGPVTTLVNNAGIGVIKSVEDTTTEEWRKILSVNLDGVFFGTRLGIQRMKNKGLGASIINMSSIMGLVGDPTLGAYNASKGAVRIMSKSAALDCALKDYDVRVNTVHPGPIKTPRKDDLEGWEEMMSQRTLTPMGHIGEPNDIAWICVYLASDESKFATGAEFVVDGGWTAQ

SEQ ID NO: 143 - DNA, 756 bp, Artificial Sequence
  Engineered Variant of Kred from Lactobacillus kefir
atgaccgatcgtctgaagcataaagtagccatcgttaccggcgggacactgggtatcggtttggcaatcgccgataaatttgtagaggagggtgcgaaagtagttattactggtcgtcacgcggatgtaggtgaaaaggccgccaaatcaatcggcggcactgatgttattcgctttgtccagcacgatgcgtccgaagaagcaggctggacgaaactgttcgacaccaccgaggaggcattcggcccggttacgaccctggtgaacaatgcagggattggggttattaaaagcgttgaagacactaccacggaggaatggcgtaaaatcctgtccgttaatctggatggtgtttttttcggcacccgtctgggcattcagcgcatgaaaaataaaggcttgggcgctagcatcatcaatatgagcagtattatggggctcgtaggcgatccgactctgggggcatacaacgcttccaagggggcggtacgtatcatgtcgaaaagcgcagcgctggattgcgcactgaaggactacgatgtgcgtgtcaacacagtacatccgggcgctatcaagaccgagcgcaaggatgatctggaaggttgggaggaaatgatgtcacagcgtacgttaacccctatgggccacattggcgaaccgaatgacatcgcatggatctgtgtgtacctggcatctgacgaatcgaaatttgcgacgggtgcagaatttgtggtcgacggcgggtggaccgcacag

SEQ ID NO: 144 - protein, 252 aa, Artificial Sequence
  Engineered Variant of Kred from Lactobacillus kefir
MTDRLKHKVAIVTGGTLGIGLAIADKFVEEGAKVVITGRHADVGEKAAKSIGGTDVIRFVQHDASEEAGWTKLFDTTEEAFGPVTTLVNNAGIGVIKSVEDTTTEEWRKILSVNLDGVFFGTRLGIQRMKNKGLGASIINMSSIMGLVGDPTLGAYNASKGAVRIMSKSAALDCALKDYDVRVNTVHPGAIKTERKDDLEGWEEMMSQRTLTPMGHIGEPNDIAWICVYLASDESKFATGAEFVVDGGWTAQ

SEQ ID NO: 145 - DNA, 756 bp, Artificial Sequence
  Engineered Variant of Kred from Lactobacillus kefir
atgaccgatcgtctgaagcataaagtagccatcgttaccggcgggacactgggtatcggtttggcaatcgccgataaatttgtagaggagggtgcgaaagtagttattactggtcgtcacgcggatgtaggtgaaaaggccgccaaatcaatcggcggcactgatgttattcgctttgtccagcacgatgcgtccgaagaagcaggctggacgaaactgttcgacaccaccgaggaggcattcggcccggttacgaccctggtgaacaatgcagggattggggttattaaaagcgttgaagacactaccacggaggaatggcgtaaaatcctgtccgttaatctggatggtgtttttttcggcacccgtctgggcattcagcgcatgaaaaataaaggcttgggcgctagcatcatcaatatgagcagtattatggggctcgtaggcgatccgactctgggggcatacaacgcttccaagggggcggtacgtatcatgtcgaaaagcgcagcgctggattgcgcactgaaggactacgatgtgcgtgtcaacacagtacatccgggccctatcaagaccgagcgcaaggatgatctggaaggttgggaggaaatgatgtcacagcgtacgttaacccctatgggccacattggcgaaccgaatgacatcgcatggatctgtgtgtacctggcatctgacgaatcgaaatttgcgacgggtgcagaatttgtggtcgacggcgggtggaccgcacag

SEQ ID NO: 146 - protein, 252 aa, Artificial Sequence
  Engineered Variant of Kred from Lactobacillus kefir
MTDRLKHKVAIVTGGTLGIGLAIADKFVEEGAKVVITGRHADVGEKAAKSIGGTDVIRFVQHDASEEAGWTKLFDTTEEAFGPVTTLVNNAGIGVIKSVEDTTTEEWRKILSVNLDGVFFGTRLGIQRMKNKGLGASIINMSSIMGLVGDPTLGAYNASKGAVRIMSKSAALDCALKDYDVRVNTVHPGPIKTERKDDLEGWEEMMSQRTLTPMGHIGEPNDIAWICVYLASDESKFATGAEFVVDGGWTAQ

SEQ ID NO: 147 - DNA, 756 bp, Artificial Sequence
  Engineered Variant of Kred from Lactobacillus kefir
atgaccgatcgtctgaagcataaagtagccatcgttaccggcgggacactgggtatcggtttggcaatcgccgataaatttgtagaggagggtgcgaaagtagttattactggtcgtcacgcggatgtaggtgaaaaggccgccaaatcaatcggcggcactgatgttattcgctttgtccagcacgatgcgtccgaagaagcaggctggacgaaactgttcgacaccaccgaggaggcattcggcccggttacgaccctggtgaacaatgcagggattggggttattaaaagcgttgaagacactaccacggaggaatggcgtaaaatcctgtccgttaatctggatggtgtttttttcggcacccgtctgggcattcagcgcatgaaaaataaaggcttgggcgctagcatcatcaatatgagcagtattatggggctcgtaggcgatccgactctgggggcatactgcgcttccaagggggcggtacgtatcatgtcgaaaagcgcagcgctggattgcgcactgaaggactacgatgtgcgtgtcaacacagtacatccgggccccatcaagaccccgcggaaggatgatctggaaggttgggaggaaatgatgtcacagcgtacgttaacccctatgggccacattggcgaaccgaatgacatcgcatggatctgtgtgtacctggcatctgacgaatcgaaatttgcgacgggtgcagaatttgtggtcgacggcgggtggaccgcacag

SEQ ID NO: 148 - protein, 252 aa, Artificial Sequence
  Engineered Variant of Kred from Lactobacillus kefir
MTDRLKHKVAIVTGGTLGIGLAIADKFVEEGAKVVITGRHADVGEKAAKSIGGTDVIRFVQHDASEEAGWTKLFDTTEEAFGPVTTLVNNAGIGVIKSVEDTTTEEWRKILSVNLDGVFFGTRLGIQRMKNKGLGASIINMSSIMGLVGDPTLGAYCASKGAVRIMSKSAALDCALKDYDVRVNTVHPGPIKTPRKDDLEGWEEMMSQRTLTPMGHIGEPNDIAWICVYLASDESKFATGAEFVVDGGWTAQ

SEQ ID NO: 149 - DNA, 756 bp, Artificial Sequence
  Engineered Variant of Kred from Lactobacillus kefir
atgaccgatcgtctgaagcataaagtagccatcgttaccggcgggacaatgggtatcggtttggcaatcgccgataaatttgtagaggagggtgcgaaagtagttattactggtcgtcacgcggatgtaggtgaaaaggccgccaaatcaatcggcggcactgatgttattcgctttgtccagcacgatgcgtccgaagaagcaggctggacgaaactgttcgacaccaccgaggaggcattcggcccggttacgaccctggtgaacaatgcagggattggggttattaaaagcgttgaagacactaccacggaggaatggcgtaaaatcctgtccgttaatctggatggtgtttttttcggcacccgtctgggcattcagcgcatgaaaaataaaggcttgggcgctagcatcatcaatatgagcagtattatggggctcgtaggcgatccgactctgggggcatacaacgcttccaagggggcggtacgtatcatgtcgaaaagcgcagcgctggattgcgcactgaaggactacgatgtgcgtgtcaacacagtacatccgggccccatcaagaccccgcggaaggatgatctggaaggttgggaggaaatgatgtcacagcgtacgttaacccctatgggccacattggcgaaccgaatgacatcgcatggatctgtgtgtacctggcatctgacgaatcgaaatttgcgacgggtgcagaatttgtggtcgacggcgggtggaccgcacag

SEQ ID NO: 150 - protein, 252 aa, Artificial Sequence
  Engineered Variant of Kred from Lactobacillus kefir
MTDRLKHKVAIVTGGTMGIGLAIADKFVEEGAKVVITGRHADVGEKAAKSIGGTDVIRFVQHDASEEAGWTKLFDTTEEAFGPVTTLVNNAGIGVIKSVEDTTTEEWRKILSVNLDGVFFGTRLGIQRMKNKGLGASIINMSSIMGLVGDPTLGAYNASKGAVRIMSKSAALDCALKDYDVRVNTVHPGPIKTPRKDDLEGWEEMMSQRTLTPMGHIGEPNDIAWICVYLASDESKFATGAEFVVDGGWTAQ

SEQ ID NO: 151 - DNA, 756 bp, Artificial Sequence; identical to SEQ ID NO: 101
  Engineered Variant of Kred from Lactobacillus kefir

SEQ ID NO: 152 - protein, 252 aa, Artificial Sequence; identical to SEQ ID NO: 102
  Engineered Variant of Kred from Lactobacillus kefir

SEQ ID NO: 153 - DNA, 756 bp, Artificial Sequence
  Engineered Variant of Kred from Lactobacillus kefir
atgaccgatcgtctgaagcataaagtagccatcgttaccggcgggacactgggtatcggtttggcaatcgccgataaatttgtagaggagggtgcgaaagtagttattactggtcgtcacgcggatgtaggtgaaaaggccgccaaatcaatcggcggcactgatgttattcgctttgtccagcacgatgcgtccgaagaagcaggctggacgaaactgttcgacaccaccgaggaggcattcggcccggttacgaccctggtgaacaatgcagggattggggttattaaaagcgttgaagacactaccacggaggaatggcgtaaaatcctgtccgttaatctggatggtgtttttttcggcacccgtctgggcattcagcgcatgaaaaataaaggcttgggcgctagcatcatcaatatgagcagtattatggggctcgtaggcgatccgactctgggggcatacaacgcttccaagggggcggtacgtatcatgtcgaaaagcgcagcgctggattgcgcactgaaggactacgatgtgcgtgtcaacacagtacatccgggccctaccaagaccgagcgcaaggatgatctggaaggttgggaggaaatgatgtcacagcgtacgttaacccctatgggccacattggcgaaccgaatgacatcgcatggatctgtgtgtacctggcatctgacgaatcgaaatttgcgacgggtgcagaatttgtggtcgacggcgggtggaccgcacag

SEQ ID NO: 154 - protein, 252 aa, Artificial Sequence
  Engineered Variant of Kred from Lactobacillus kefir
MTDRLKHKVAIVTGGTLGIGLAIADKFVEEGAKVVITGRHADVGEKAAKSIGGTDVIRFVQHDASEEAGWTKLFDTTEEAFGPVTTLVNNAGIGVIKSVEDTTTEEWRKILSVNLDGVFFGTRLGIQRMKNKGLGASIINMSSIMGLVGDPTLGAYNASKGAVRIMSKSAALDCALKDYDVRVNTVHPGPTKTERKDDLEGWEEMMSQRTLTPMGHIGEPNDIAWICVYLASDESKFATGAEFVVDGGWTAQ

SEQ ID NO: 155 - DNA, 756 bp, Artificial Sequence
  Engineered Variant of Kred from Lactobacillus kefir
atgaccgatcgtctgaagcataaagtagccatcgttaccggcgggacactgggtatcggtttggcaatcgccgataaatttgtagaggagggtgcgaaagtagttattactggtcgtcacgcggatgtaggtgaaaaggccgccaaatcaatcggcggcactgatgttattcgctttgtccagcacgatgcgtccgaagaagcaggctggacgaaactgttcgacaccaccgaggaggcattcggcccggttacgaccctggtgaacaatgcagggattggggttattaaaagcgttgaagacactaccacggaggaatggcgtaaaatcctgtccgttaatctggatggtgtttttttcggcacccgtctgggcattcagcgcatgaaaaataaaggcttgggcgctagcatcatcaatatgagcagtattatggggctcgtaggcgatccgactctgggggcatacaacgcttccaagggggcggtacgtatcatgtcgaaaagcgcagcgctggattgcgcactgaaggactacgatgtgcgtgtcaacacagtacatccgggcgctaccaagaccgagcgcaaggatgatctggaaggttgggaggaaatgatgtcacagcgtacgttaacccctatgggccacattggcgaaccgaatgacatcgcatggatctgtgtgtacctggcatctgacgaatcgaaatttgcgacgggtgcagaatttgtggtcgacggcgggtggaccgcacag

SEQ ID NO: 156 - protein, 252 aa, Artificial Sequence
  Engineered Variant of Kred from Lactobacillus kefir
MTDRLKHKVAIVTGGTLGIGLAIADKFVEEGAKVVITGRHADVGEKAAKSIGGTDVIRFVQHDASEEAGWTKLFDTTEEAFGPVTTLVNNAGIGVIKSVEDTTTEEWRKILSVNLDGVFFGTRLGIQRMKNKGLGASIINMSSIMGLVGDPTLGAYNASKGAVRIMSKSAALDCALKDYDVRVNTVHPGATKTERKDDLEGWEEMMSQRTLTPMGHIGEPNDIAWICVYLASDESKFATGAEFVVDGGWTAQ

SEQ ID NO: 157 - DNA, 756 bp, Artificial Sequence
  Engineered Variant of Kred from Lactobacillus kefir
atgaccgatcgtctgaagcataaagtagccatcgttaccggcgggacactgggtatcggtttggcaatcgccgataaatttgtagaggagggtgcgaaagtagttattactggtcgtcacgcggatgtaggtgaaaaggccgccaaatcaatcggcggcactgatgttattcgctttgtccagcacgatgcgtccgaagaagcaggctggacgaaactgttcgacaccaccgaggaggcattcggcccggttacgaccctggtgaacaatgcagggattggggttattaaaagcgttgaagacactaccacggaggaatggcgtaaaatcctgtccgttaatctggatggtgtttttttcggcacccgtctgggcattcagcgcatgaaaaataaaggcttgggcgctagcatcatcaatatgagcagtattatggggctcgtaggcgatccgactctgggggcatacaacgctactaagggggcggtacgtatcatgtcgaaaagcgcagcgctggattgcgcactgaaggactacgatgtgcgtgtcaacacagtacatccgggccccatcaagaccccgcggaaggatgatctggaaggttgggaggaaatgatgtcacagcgtacgttaacccctatgggccacattggcgaaccgaatgacatcgcatggatctgtgtgtacctggcatctgacgaatcgaaatttgcgacgggtgcagaatttgtggtcgacggcgggtggaccgcacag

SEQ ID NO: 158 - protein, 252 aa, Artificial Sequence
  Engineered Variant of Kred from Lactobacillus kefir
MTDRLKHKVAIVTGGTLGIGLAIADKFVEEGAKVVITGRHADVGEKAAKSIGGTDVIRFVQHDASEEAGWTKLFDTTEEAFGPVTTLVNNAGIGVIKSVEDTTTEEWRKILSVNLDGVFFGTRLGIQRMKNKGLGASIINMSSIMGLVGDPTLGAYNATKGAVRIMSKSAALDCALKDYDVRVNTVHPGPIKTPRKDDLEGWEEMMSQRTLTPMGHIGEPNDIAWICVYLASDESKFATGAEFVVDGGWTAQ

SEQ ID NO: 159 - DNA, 756 bp, Artificial Sequence; identical to SEQ ID NO: 135
  Engineered Variant of Kred from Lactobacillus kefir

SEQ ID NO: 160 - protein, 252 aa, Artificial Sequence; identical to SEQ ID NO: 136
  Engineered Variant of Kred from Lactobacillus kefir

SEQ ID NO: 161 - DNA, 756 bp, Artificial Sequence
  Engineered Variant of Kred from Lactobacillus kefir
atgaccgatcgtctgaagcataaagtagccatcgttaccggcgggacactgggtatcggtttggcaatcgccgataaatttgtagaggagggtgcgaaagtagttattactggtcgtcacgcggatgtaggtgaaaaggccgccaaatcaatcggcggcactgatgttattcgctttgtccagcacgatgcgtccgaagaagcaggctggacgaaactgttcgacaccaccgaggaggcattcggcccggttacgaccctggtgaacaatgcagggattggggttattaaaagcgttgaagacactaccacggaggaatggcgtaaaatcctgtccgttaatctggatggtgtttttttcggcacccgtctgggcattcagcgcatgaaaaataaaggcttgggcgctagcatcatcaatatgagcagtattatggggctcgtaggcgatccgactctgggggcatacaacgcttccaagggggcggtacgtatcatgtcgaaaagcgcagcgctggattgcgcactgaaggactacgatgtgcgtgtcaacacagtacatccgggccccatcaagaccccgcggaaggatgcgctggaaggttgggaggaaatgatgtcacagcgtacgttaacccctatgggccacattggcgaaccgaatgacatcgcatggatctgtgtgtacctggcatctgacgaatcgaaatttgcgacgggtgcagaatttgtggtcgacggcgggtggaccgcacag

SEQ ID NO: 162 - protein, 252 aa, Artificial Sequence; identical to SEQ ID NO: 106
  Engineered Variant of Kred from Lactobacillus kefir

SEQ ID NO: 163 - DNA, 756 bp, Artificial Sequence
  Engineered Variant of Kred from Lactobacillus kefir
atgaccgatcgtctgaagcataaagtagccatcgttaccggcgggacaatgggtatcggtttggcaatcgccgataaatttgtagaggagggtgcgaaagtagttattactggtcgtcacgcggatgtaggtgaaaaggccgccaaatcaatcggcggcactgatgttattcgctttgtccagcacgatgcgtccgaagaagcaggctggacgaaactgttcgacaccaccgaggaggcattcggcccggttacgaccctggtgaacaatgcagggattggggttattaaaagcgttgaagacactaccacggaggaatggcgtaaaatcctgtccgttaatctggatggtgtttttttcggcacccgtctgggcattcagcgcatgaaaaataaaggcttgggcgctagcatcatcaatatgagcagtattatggggctcgtaggcgatccgactctgggggcatacaacgcttccaagggggcggtacgtatcatgtcgaaaagcgcagcgctggattgcgcactgaaggactacgatgtgcgtgtcaacacagtacatccgggcgcgatcaagaccccacggaaggatgctctggaaggttgggaggaaatgatgtcacagcgtacgttaacccctatgggccacattggcgaaccgaatgacatcgcatggatctgtgtgtacctggcatctgacgaatcgaaatttgcgacgggtgcagaatttgtggtcgacggcgggtggaccgcacag

SEQ ID NO: 164 - protein, 252 aa, Artificial Sequence
  Engineered Variant of Kred from Lactobacillus kefir
MTDRLKHKVAIVTGGTMGIGLAIADKFVEEGAKVVITGRHADVGEKAAKSIGGTDVIRFVQHDASEEAGWTKLFDTTEEAFGPVTTLVNNAGIGVIKSVEDTTTEEWRKILSVNLDGVFFGTRLGIQRMKNKGLGASIINMSSIMGLVGDPTLGAYNASKGAVRIMSKSAALDCALKDYDVRVNTVHPGAIKTPRKDALEGWEEMMSQRTLTPMGHIGEPNDIAWICVYLASDESKFATGAEFVVDGGWTAQ

SEQ ID NO: 165 - DNA, 756 bp, Artificial Sequence
  Engineered Variant of Kred from Lactobacillus kefir
atgaccgatcgtctgaagcataaagtagccatcgttaccggcgggacaatgggtatcggtttggcaatcgccgataaatttgtagaggagggtgcgaaagtagttattactggtcgtcacgcggatgtaggtgaagtagccgccaaatcaatcggcggcactgatgttattcgctttgtccagcacgatgcgtccgaagaagcaggctggacgaaactgttcgacaccaccgaggaggcattcggcccggttacgaccctggtgaacaatgcagggattggggttattaaaagcgttgaagacactaccacggaggaatggcgtaaaatcctgtccgttaatctggatggtgtttttttcggcacccgtctgggcattcagcgcatgaaaaataaaggcttgggcgctagcatcatcaatatgagcagtattatggggctcgtaggcgatccgactctgggggcatacaacgcttccaagggggcggtacgtatcatgtcgaaaagcgcagcgctggattgcgcactgaaggactacgatgtgcgtgtcaacacagtacatccgggccccatcaagaccccgcggaaggatgctctggaaggttgggaggaaatgatgtcacagcgtacgcgtacccctatgggccacattggcgaaccgaatgacatcgcatggatctgtgtgtacctggcatctgacgaatcgaaatttgcgacgggtgcagaatttgtggtcgacggcgggtggaccgcacag

SEQ ID NO: 166 - protein, 252 aa, Artificial Sequence
  Engineered Variant of Kred from Lactobacillus kefir
MTDRLKHKVAIVTGGTMGIGLAIADKFVEEGAKVVITGRHADVGEVAAKSIGGTDVIRFVQHDASEEAGWTKLFDTTEEAFGPVTTLVNNAGIGVIKSVEDTTTEEWRKILSVNLDGVFFGTRLGIQRMKNKGLGASIINMSSIMGLVGDPTLGAYNASKGAVRIMSKSAALDCALKDYDVRVNTVHPGPIKTPRKDALEGWEEMMSQRTRTPMGHIGEPNDIAWICVYLASDESKFATGAEFVVDGGWTAQ

SEQ ID NO: 167 - DNA, 756 bp, Artificial Sequence
  Engineered Variant of Kred from Lactobacillus kefir
atgaccgatcgtctgaagcataaagtagccatcgttaccggcgggacacagggtatcggtttggcaatcgccgataaatttgtagaggagggtgcgaaagtagttattactggtcgtcacgcggatgtaggtgaagtagccgccaaatcaatcggcggcactgatgttattcgctttgtccagcacgatgcgtccgaagaagcaggctggacgaaactgttcgacaccaccgaggaggcattcggcccggttacgaccctggtgaacaatgcagggattggggttattaaaagcgttgaagacactaccacggaggaatggcgtaaaatcctgtccgttaatctggatggtgtttttttcggcacccgtctgggcattcagcgcatgaaaaataaaggcttgggcgctagcatcatcaatatgagcagtattatggggctcgtaggcgatccgactctgggggcatacaacgcttccaagggggcggtacgtatcatgtcgaaaagcgcagcgctggattgcgcactgaaggactacgatgtgcgtgtcaacacagtacatccgggcccgatcaagaccgagcggaaggatcagctggaaggttgggaggaaatgatgtcacagcgtacgttaacccctatgggccacattggcgaaccgaatgacatcgcatggatctgtgtgtacctggcatctgacgaatcgaaatttgcgacgggtgcagaatttgtggtcgacggcgggtggaccgcacag

SEQ ID NO: 168 - protein, 252 aa, Artificial Sequence
  Engineered Variant of Kred from Lactobacillus kefir
MTDRLKHKVAIVTGGTQGIGLAIADKFVEEGAKVVITGRHADVGEVAAKSIGGTDVIRFVQHDASEEAGWTKLFDTTEEAFGPVTTLVNNAGIGVIKSVEDTTTEEWRKILSVNLDGVFFGTRLGIQRMKNKGLGASIINMSSIMGLVGDPTLGAYNASKGAVRIMSKSAALDCALKDYDVRVNTVHPGPIKTERKDQLEGWEEMMSQRTLTPMGHIGEPNDIAWICVYLASDESKFATGAEFVVDGGWTAQ

SEQ ID NO: 169 - DNA, 756 bp, Artificial Sequence
  Engineered Variant of Kred from Lactobacillus kefir
atgaccgatcgtctgaagcataaagtagccatcgttaccggcgggacaatgggtatcggtttggcaatcgccgataaatttgtagaggagggtgcgaaagtagttattactggtcgtcacgcggatgtaggtgaagtagccgccaaatcaatcggcggcactgatgttattcgctttgtccagcacgatgcgtccgaagaagcaggctggacgaaactgttcgacaccaccgaggaggcattcggcccggttacgaccctggtgaacaatgcagggattggggttattaaaagcgttgaagacactaccacggaggaatggcgtaaaatcctgtccgttaatctggatggtgtttttttcggcacccgtctgggcattcagcgcatgaaaaataaaggcttgggcgctagcatcatcaatatgagcagtattatggggctcgtaggcgatccgactctgggggcatacaacgcttccaagggggcggtacgtatcatgtcgaaaagcgcagcgctggattgcgcactgaaggactacgatgtgcgtgtcaacacagtacatccgggcgcgatcaagaccccacggaaggatgatctggaaggttgggaggaaatgatgtcacagcgtacgttaacccctatgggccacattggcgaaccgaatgacatcgcatggatctgtgtgtacctggcatctgacgaatcgaaatttgcgacgggtgcagaatttgtggtcgacggcgggtggaccgcacag

SEQ ID NO: 170 - protein, 252 aa, Artificial Sequence
  Engineered Variant of Kred from Lactobacillus kefir
MTDRLKHKVAIVTGGTMGIGLAIADKFVEEGAKVVITGRHADVGEVAAKSIGGTDVIRFVQHDASEEAGWTKLFDTTEEAFGPVTTLVNNAGIGVIKSVEDTTTEEWRKILSVNLDGVFFGTRLGIQRMKNKGLGASIINMSSIMGLVGDPTLGAYNASKGAVRIMSKSAALDCALKDYDVRVNTVHPGAIKTPRKDDLEGWEEMMSQRTLTPMGHIGEPNDIAWICVYLASDESKFATGAEFVVDGGWTAQ

SEQ ID NO: 171 - DNA, 756 bp, Artificial Sequence
  Engineered Variant of Kred from Lactobacillus kefir
atgaccgatcgtctgaagcataaagtagccatcgttaccggcgggacaatgggtatcggtttggcaatcgccgataaatttgtagaggagggtgcgaaagtagttattactggtcgtcacgcggatgtaggtgaaaaagccgccaaatcaatcggcggcactgatgttattcgctttgtccagcacgatgcgtccgaagaagcaggctggacgaaactgttcgacaccaccgaggaggcattcggcccggttacgaccctggtgaacaatgcagggattggggttattaaaagcgttgaagacactaccacggaggaatggcgtaaaatcctgtccgttaatctggatggtgtttttttcggcacccgtctgggcattcagcgcatgaaaaataaaggcttgggcgctagcatcatcaatatgagcagtattatggggctcgtaggcgatccgactctgggggcatacaacgcttccaagggggcggtacgtatcatgtcgaaaagcgcagcgctggattgcgcactgaaggactacgatgtgcgtgtcaacacagtacatccgggcgcgatcaagaccccacggaaggatcagctggaaggttgggaggaaatgatgtcacagcgtacgctgacccctatgggccacattggcgaaccgaatgacatcgcatggatctgtgtgtacctggcatctgacgaatcgaaatttgcgacgggtgcagaatttgtggtcgacggcgggtggaccgcacag

SEQ ID NO: 172 - protein, 252 aa, Artificial Sequence
  Engineered Variant of Kred from Lactobacillus kefir
MTDRLKHKVAIVTGGTMGIGLAIADKFVEEGAKVVITGRHADVGEKAAKSIGGTDVIRFVQHDASEEAGWTKLFDTTEEAFGPVTTLVNNAGIGVIKSVEDTTTEEWRKILSVNLDGVFFGTRLGIQRMKNKGLGASIINMSSIMGLVGDPTLGAYNASKGAVRIMSKSAALDCALKDYDVRVNTVHPGAIKTPRKDQLEGWEEMMSQRTLTPMGHIGEPNDIAWICVYLASDESKFATGAEFVVDGGWTAQ

SEQ ID NO: 173 - DNA, 756 bp, Artificial Sequence
  Engineered Variant of Kred from Lactobacillus kefir
atgaccgatcgtctgaagcataaagtagccatcgttaccggcgggacacagggtatcggtttggcaatcgccgataaatttgtagaggagggtgcgaaagtagttattactggtcgtcacgcggatgtaggtgaagtagccgccaaatcaatcggcggcactgatgttattcgctttgtccagcacgatgcgtccgaagaagcaggctggacgaaactgttcgacaccaccgaggaggcattcggcccggttacgaccctggtgaacaatgcagggattggggttattaaaagcgttgaagacactaccacggaggaatggcgtaaaatcctgtccgttaatctggatggtgtttttttcggcacccgtctgggcattcagcgcatgaaaaataaaggcttgggcgctagcatcatcaatatgagcagtattatggggctcgtaggcgatccgactctgggggcatacaacgcttccaagggggcggtacgtatcatgtcgaaaagcgcagcgctggattgcgcactgaaggactacgatgtgcgtgtcaacacagtacatccgggcgcgatcaagaccgagcggaaggatcagctggaaggttgggaggaaatgatgtcacagcgtacgttaacccctatgggccacattggcgaaccgaatgacatcgcatggatctgtgtgtacctggcatctgacgaatcgaaatttgcgacgggtgcagaatttgtggtcgacggcgggtggaccgcacag

SEQ ID NO: 174 - protein, 252 aa, Artificial Sequence
  Engineered Variant of Kred from Lactobacillus kefir
MTDRLKHKVAIVTGGTQGIGLAIADKFVEEGAKVVITGRHADVGEVAAKSIGGTDVIRFVQHDASEEAGWTKLFDTTEEAFGPVTTLVNNAGIGVIKSVEDTTTEEWRKILSVNLDGVFFGTRLGIQRMKNKGLGASIINMSSIMGLVGDPTLGAYNASKGAVRIMSKSAALDCALKDYDVRVNTVHPGAIKTERKDQLEGWEEMMSQRTLTPMGHIGEPNDIAWICVYLASDESKFATGAEFVVDGGWTAQ

SEQ ID NO: 175 - DNA, 756 bp, Artificial Sequence
  Engineered Variant of Kred from Lactobacillus kefir
atgaccgatcgtctgaagcataaagtagccatcgttaccggcgggacaatgggtatcggtttggcaatcgccgataaatttgtagaggagggtgcgaaagtagttattactggtcgtcacgcggatgtaggtgaaaaagccgccaaatcaatcggcggcactgatgttattcgctttgtccagcacgatgcgtccgaagaagcaggctggacgaaactgttcgacaccaccgaggaggcattcggcccggttacgaccctggtgaacaatgcagggattggggttgttaaaagcgttgaagacactaccacggaggaatggcgtaaaatcctgtccgttaatctggatggtgtttttttcggcacccgtctgggcattcagcgcatgaaaaataaaggcttgggcgctagcatcatcaatatgagcagtattatggggctcgtaggcgatccgactctgggggcatacaacgcttccaagggggcggtacgtatcatgtcgaaaagcgcagcgctggattgcgcactgaaggactacgatgtgcgtgtcaacacagtacatccgggcccgatcaagaccgagcggaaggatcagctggaaggttgggaggaaatgatgtcacagcgtacgttaacccctatgggccacattggcgaaccgaatgacatcgcatggatctgtgtgtacctggcatctgacgaatcgaaatttgcgacgggtgcagaatttgtggtcgacggcgggtggaccgcacag

SEQ ID NO: 176 - protein, 252 aa, Artificial Sequence
  Engineered Variant of Kred from Lactobacillus kefir
MTDRLKHKVAIVTGGTMGIGLAIADKFVEEGAKVVITGRHADVGEKAAKSIGGTDVIRFVQHDASEEAGWTKLFDTTEEAFGPVTTLVNNAGIGVVKSVEDTTTEEWRKILSVNLDGVFFGTRLGIQRMKNKGLGASIINMSSIMGLVGDPTLGAYNASKGAVRIMSKSAALDCALKDYDVRVNTVHPGPIKTERKDQLEGWEEMMSQRTLTPMGHIGEPNDIAWICVYLASDESKFATGAEFVVDGGWTAQ

SEQ ID NO: 177 - DNA, 756 bp, Artificial Sequence
  Engineered Variant of Kred from Lactobacillus kefir
atgaccgatcgtctgaagcataaagtagccatcgttaccggcgggacaatgggtatcggtttggcaatcgccgataaatttgtagaggagggtgcgaaagtagttattactggtcgtcacgcggatgtaggtgaaaaagccgccaaatcaatcggcggcactgatgttattcgctttgtccagcacgatgcgtccgaagaagcaggctggacgaaactgttcgacaccaccgaggaggcattcggcccggttacgaccctggtgaacaatgcagggattggggttattaaaagcgttgaagacactaccacggaggaatggcgtaaaatcctgtccgttaatctggatggtgtttttttcggcacccgtctgggcattcagcgcatgaaaaataaaggcttgggcgctagcatcatcaatatgagcagtattatggggctcgtaggcgatccgactctgggggcatacaacgcttccaagggggcggtacgtatcatgtcgaaaagcgcagcgctggattgcgcactgaaggactacgatgtgcgtgtcaacacagtacatccgggcgcgatcaagaccccacggaaggatcagctggaaggttgggagcagatgatgtcacagcgtacgctgacccctatgggccacattggcgaaccgaatgacatcgcatggatctgtgtgtacctggcatctgacgaatcgaaatttgcgacgggtgcagaatttgtggtcgacggcgggtggaccgcacag

SEQ ID NO: 178 - protein, 252 aa, Artificial Sequence
  Engineered Variant of Kred from Lactobacillus kefir
MTDRLKHKVAIVTGGTMGIGLAIADKFVEEGAKVVITGRHADVGEKAAKSIGGTDVIRFVQHDASEEAGWTKLFDTTEEAFGPVTTLVNNAGIGVIKSVEDTTTEEWRKILSVNLDGVFFGTRLGIQRMKNKGLGASIINMSSIMGLVGDPTLGAYNASKGAVRIMSKSAALDCALKDYDVRVNTVHPGAIKTPRKDQLEGWEQMMSQRTLTPMGHIGEPNDIAWICVYLASDESKFATGAEFVVDGGWTAQ

SEQ ID NO: 179 - DNA, 756 bp, Artificial Sequence
  Engineered Variant of Kred from Lactobacillus kefir
atgaccgatcgtctgaagcataaagtagccatcgttaccggcgggacaatgggtatcggtttggcaatcgccgataaatttgtagaggagggtgcgaaagtagttattactggtcgtcacgcggatgtaggtgaaaaagccgccaaatcaatcggcggcactgatgttattcgctttgtccagcacgatgcgtccgaagaagcaggctggacgaaactgttcgacaccaccgaggaggcattcggcccggttacgaccctggtgaacaatgcagggattggggttattaaaagcgttgaagacactaccacggaggaatggcgtaaaatcctgtccgttaatctggatggtgtttttttcggcacccgtctgggcattcagcgcatgaaaaataaaggcttgggcgctagcatcatcaatatgagcagtattatggggctcgtaggcgatccgactctgggggcatacaacgcttccaagggggcggtacgtatcatgtcgaaaagcgcagcgctggattgcgcactgaaggactacgatgtgcgtgtcaacacagtacatccgggcgcgatcaagaccccacggaaggatcagctggaaggttgggaggaaatgatgtcacagcgtacgctgacccctatgggccacattggcgaaccgaatgacatcgcatgggtgtgtgtgtacctggcatctgacgaatcgaaatttgcgacgggtgcagaatttgtggtcgacggcgggtggaccgcacag

SEQ ID NO: 180 - protein, 252 aa, Artificial Sequence
  Engineered Variant of Kred from Lactobacillus kefir
MTDRLKHKVAIVTGGTMGIGLAIADKFVEEGAKVVITGRHADVGEKAAKSIGGTDVIRFVQHDASEEAGWTKLFDTTEEAFGPVTTLVNNAGIGVIKSVEDTTTEEWRKILSVNLDGVFFGTRLGIQRMKNKGLGASIINMSSIMGLVGDPTLGAYNASKGAVRIMSKSAALDCALKDYDVRVNTVHPGAIKTPRKDQLEGWEEMMSQRTLTPMGHIGEPNDIAWVCVYLASDESKFATGAEFVVDGGWTAQ

SEQ ID NO: 181 - DNA, 756 bp, Artificial Sequence
  Engineered Variant of Kred from Lactobacillus kefir
atgaccgatcgtctgaagcataaagtagccatcgttaccggcgggacaatgggtatcggtttggcaatcgccgataaatttgtagaggagggtgcgaaagtagttattactggtcgtcacgcggatgtaggtgaaaaagccgccaaatcaatcggcggcactgatgttattcgctttgtccagcacgatgcgtccgaagaagcaggctggacgaaactgttcgacaccaccgaggaggcattcggcccggttacgaccctggtgaacaatgcagggattggggttattaaaagcgttgaatatactaccacggaggaatggcgtaaaatcctgtccgttaatctggatggtgtttttttcggcacccgtctgggcattcagcgcatgaaaaataaaggcttgggcgctagcatcatcaatatgagcagtattatggggctcgtaggcgatccgactctgggggcatacaacgcttccaagggggcggtacgtatcatgtcgaaaagcgcagcgctggattgcgcactgaaggactacgatgtgcgtgtcaacacagtacatccgggcgcgatcaagaccccacggaaggatcagctggaaggttgggaggaaatgatgtcacagcgtacgctgacccctatgggccacattggcgaaccgaatgacatcgcatggatctgtgtgtacctggcatctgacgaatcgaaatttgcgacgggtgcagaatttgtggtcgacggcgggtggaccgcacag

SEQ ID NO: 182 - protein, 252 aa, Artificial Sequence
  Engineered Variant of Kred from Lactobacillus kefir
MTDRLKHKVAIVTGGTMGIGLAIADKFVEEGAKVVITGRHADVGEKAAKSIGGTDVIRFVQHDASEEAGWTKLFDTTEEAFGPVTTLVNNAGIGVIKSVEYTTTEEWRKILSVNLDGVFFGTRLGIQRMKNKGLGASIINMSSIMGLVGDPTLGAYNASKGAVRIMSKSAALDCALKDYDVRVNTVHPGAIKTPRKDQLEGWEEMMSQRTLTPMGHIGEPNDIAWICVYLASDESKFATGAEFVVDGGWTAQ

SEQ ID NO: 183 - DNA, 756 bp, Artificial Sequence
  Engineered Variant of Kred from Lactobacillus kefir
atgaccgatcgtctgaagcataaagtagccatcgttaccggcgggacaatgggtatcggtttggcaatcgccgataaatttgtagaggagggtgcgaaagtagttattactggtcgtcacgcggatgtaggtgaaaaagccgccaaatcaatcggcggcactgatgttattcgctttgtccagcacgatgcgtccgaagaagcaggctggacgaaactgttcgacaccaccgaggaggcattcggcccggttacgaccctggtgaacaatgcagggattggggttattaaaagcgttgaagacactaccacggaggaatggcgtaaaatcctgtccgttaatctggatggtgtttttttcggcacccgtctgggcattcagcgcatgaaaaataaaggcttgggcgctagcatcatcaatatgagcagtattatggggctcgtaggcgatccgactctgggggcatacaacgcttccaagggggcggtacgtatcatgtcgaaaagcgcagcgctggattgcgcactgaaggacatggatgtgcgtgtcaacacagtacatccgggcgcgatcaagaccccacggaaggatcagctggaaggttgggaggaaatgatgtcacagcgtacgctgacccctatgggccacattggcgaaccgaatgacatcgcatggatctgtgtgtacctggcatctgacgaatcgaaatttgcgacgggtgcagaatttgtggtcgacggcgggtggaccgcacag

SEQ ID NO: 184 - protein, 252 aa, Artificial Sequence
  Engineered Variant of Kred from Lactobacillus kefir
MTDRLKHKVAIVTGGTMGIGLAIADKFVEEGAKVVITGRHADVGEKAAKSIGGTDVIRFVQHDASEEAGWTKLFDTTEEAFGPVTTLVNNAGIGVIKSVEDTTTEEWRKILSVNLDGVFFGTRLGIQRMKNKGLGASIINMSSIMGLVGDPTLGAYNASKGAVRIMSKSAALDCALKDMDVRVNTVHPGAIKTPRKDQLEGWEEMMSQRTLTPMGHIGEPNDIAWICVYLASDESKFATGAEFVVDGGWTAQ

SEQ ID NO: 185 - DNA, 756 bp, Artificial Sequence
  Engineered Variant of Kred from Lactobacillus kefir
atgaccgatcgtctgaagcataaagtagccatcgttaccggcgggacaatgggtatcggtttggcaatcgccgataaatttgtagaggagggtgcgaaagtagttattactggtcgtcacgcggatgtaggtgaaaaagccgccaaatcaatcggcggcactgatgttattcgctttgtccagcacgatgcgtccgaagaagcaggctggacgaaactgttcgacaccaccgaggaggcattcggcccggttacgaccctggtgaacaatgcagggattggggttattaaaagcgttgaacggactaccacggaggaatggcgtaaaatcctgtccgttaatctggatggtgtttttttcggcacccgtctgggcattcagcgcatgaaaaataaaggcttgggcgctagcatcatcaatatgagcagtattatggggctcgtaggcgatccgactctgggggcatacaacgcttccaagggggcggtacgtatcatgtcgaaaagcgcagcgctggattgcgcactgaaggactacgatgtgcgtgtcaacacagtacatccgggcgcgatcaagaccccacggaaggatcagctggaaggttgggaggaaatgatgtcacagcgtacgctgacccctatgggccacattggcgaaccgaatgacatcgcatggatctgtgtgtacctggcatctgacgaatcgaaatttgcgacgggtgcagaatttgtggtcgacggcgggtggaccgcacag

SEQ ID NO: 186 - protein, 252 aa, Artificial Sequence
  Engineered Variant of Kred from Lactobacillus kefir
MTDRLKHKVAIVTGGTMGIGLAIADKFVEEGAKVVITGRHADVGEKAAKSIGGTDVIRFVQHDASEEAGWTKLFDTTEEAFGPVTTLVNNAGIGVIKSVERTTTEEWRKILSVNLDGVFFGTRLGIQRMKNKGLGASIINMSSIMGLVGDPTLGAYNASKGAVRIMSKSAALDCALKDYDVRVNTVHPGAIKTPRKDQLEGWEEMMSQRTLTPMGHIGEPNDIAWICVYLASDESKFATGAEFVVDGGWTAQ

SEQ ID NO: 187 - DNA, 756 bp, Artificial Sequence
  Engineered Variant of Kred from Lactobacillus kefir
atgaccgatcgtctgaagcataaagtagccatcgttaccggcgggacaatgggtatcggtttggcaatcgccgataaatttgtagaggagggtgcgaaagtagttattactggtcgtcacgcggatgtaggtgaaaaagccgccaaatcaatcggcggcactgatgttattcgctttgtccagcacgatgcgtccgaagaagcaggctggacgaaactgttcgacaccaccgaggaggcattcggcccggttacgaccctggtgaacaatgcagggattggggttattaaaagcgttgaagacactaccacggaggaatggcgtaaaatcctgtccgttaatctggatggtgtttttttcggcacccgtctgggcattcagcgcatgaaaaataaaggcttgggcgctagcatcatcaatatgagcagtattatggggctcgtaggcgatccgactctgggggcatacaacgcttccaagggggcggtacgtatcatgtcgaaaagcgcagcgctggattgcgcactgaaggactacgatgtgcgtgtcaacacagtacatccgggcgcgatcaagaccccacggaaggatcagctggaaggttgggaggaaatgatgtcacagcgtacgctgacccctatgggccacattggcgaaccgaatgacatcgcatggatctgtgtgtacctggggtctgacgaatcgaaatttgcgacgggtgcagaatttgtggtcgacggcgggtggaccgcacag

SEQ ID NO: 188 - protein, 252 aa, Artificial Sequence
  Engineered Variant of Kred from Lactobacillus kefir
MTDRLKHKVAIVTGGTMGIGLAIADKFVEEGAKVVITGRHADVGEKAAKSIGGTDVIRFVQHDASEEAGWTKLFDTTEEAFGPVTTLVNNAGIGVIKSVEDTTTEEWRKILSVNLDGVFFGTRLGIQRMKNKGLGASIINMSSIMGLVGDPTLGAYNASKGAVRIMSKSAALDCALKDYDVRVNTVHPGAIKTPRKDQLEGWEEMMSQRTLTPMGHIGEPNDIAWICVYLGSDESKFATGAEFVVDGGWTAQ

SEQ ID NO: 189 - DNA, 756 bp, Artificial Sequence
  Engineered Variant of Kred from Lactobacillus kefir
atgaccgatcgtctgaagcataaagtagccatcgttaccggcgggacaatgggtatcggtttggcaatcgccgataaatttgtagaggagggtgcgaaagtagttattactggtcgtcacgcggatgtaggtgaaaaagccgccaaatcaatcggcggcactgatgttattcgctttgtccagcacgatgcgtccgaagaagcaggctggacgaaactgttcgacaccaccgaggaggcattcggcccggttacgaccctggtgaacaatgcagggattggggttattaaaagcgttgaagacactaccacggaggaatggcgtaaaatcctgtccgttaatctggatggtgtttttttcggcacccgtctgggcattcagcgcatgaaaaataaaggcttgggcgctagcatcatcaatatgagcagtattatggggctcgtaggcgatccgactctgggggcatacaacgcttccaagggggcggtacgtatcatgtcgaaaagcgcagcgctggattgcgcactgaaggactacgatgtgcgtgtcaacacagtacatccgggcgcgatcaagaccgagcggaaggatcagctggaaggttgggaggaaatgatgtcacagcgtacgctgacccctatgggccacattggcgaaccgaatgacatcgcatggatctgtgtgtacctggcatctgacgaatcgaaatttgcgacgggtgcagaatttgtggtcgacggcgggtggaccgcacag

SEQ ID NO: 190 - protein, 252 aa, Artificial Sequence
  Engineered Variant of Kred from Lactobacillus kefir
MTDRLKHKVAIVTGGTMGIGLAIADKFVEEGAKVVITGRHADVGEKAAKSIGGTDVIRFVQHDASEEAGWTKLFDTTEEAFGPVTTLVNNAGIGVIKSVEDTTTEEWRKILSVNLDGVFFGTRLGIQRMKNKGLGASIINMSSIMGLVGDPTLGAYNASKGAVRIMSKSAALDCALKDYDVRVNTVHPGAIKTERKDQLEGWEEMMSQRTLTPMGHIGEPNDIAWICVYLASDESKFATGAEFVVDGGWTAQ

SEQ ID NO: 191 - DNA, 756 bp, Artificial Sequence
  Engineered Variant of Kred from Lactobacillus kefir
atgaccgatcgtctgaagcataaagtagccatcgttaccggcgggacaatgggtatcggtttggcaatcgccgataaatttgtagaggagggtgcgaaagtagttattactggtcgtcacgcggatgtaggtttgaaggccgccaaatcaatcggcggcactgatgttattcgctttgtccagcacgatgcgtccgaagaagcaggctggacgaaactgttcgacaccaccgaggaggcattcggcccggttacgaccctggtgaacaatgcagggattggggttattaaaagcgttgaagacactaccacggaggaatggcgtaaaatcctgtccgttaatctggatggtgtttttttcggcacccgtctgggcattcagcgcatgaaaaataaaggcttgggcgctagcatcatcaatatgagcagtattatggggctcgtaggcgatccgactctgggggcatacaacgcttccaagggggcggtacgtatcatgtcgaaaagcgcagcgctggattgcgcactgaaggactacgatgtgcgtgtcaacacagtacatccgggcgcgatcaagaccccacggaaggatcagctggaaggttgggaggaaatgatgtcacagcgtacgctgacccctatgggccacattggcgaaccgaatgacatcgcatggatctgtgtgtacctggcatctgacgaatcgaaatttgcgacgggtgcagaatttgtggtcgacggcgggtggaccgcacag

SEQ ID NO: 192 - protein, 252 aa, Artificial Sequence
  Engineered Variant of Kred from Lactobacillus kefir
MTDRLKHKVAIVTGGTMGIGLAIADKFVEEGAKVVITGRHADVGLKAAKSIGGTDVIRFVQHDASEEAGWTKLFDTTEEAFGPVTTLVNNAGIGVIKSVEDTTTEEWRKILSVNLDGVFFGTRLGIQRMKNKGLGASIINMSSIMGLVGDPTLGAYNASKGAVRIMSKSAALDCALKDYDVRVNTVHPGAIKTPRKDQLEGWEEMMSQRTLTPMGHIGEPNDIAWICVYLASDESKFATGAEFVVDGGWTAQ

SEQ ID NO: 193 - DNA, 756 bp, Artificial Sequence
  Engineered Variant of Kred from Lactobacillus kefir
atgaccgatcgtctgaagcataaagtagccatcgttaccggcgggacaatgggtatcggtttggcaatcgccgataaatttgtagaggagggtgcgaaagtagttattactggtcgtcacgcggatgtaggtgaaaaagccgccaaatcaatcggcggcactgatgttattcgctttgtccagcacgatgcgtccgaagaagcaggctggacgaaactgttcgacaccaccgaggaggcattcggcccggttacgaccctggtgaacaatgcagggattggggtaattaagagcgttgaacggactaccacggaggaatggcgtaaaatcctgtccgttaatctggatggtgtttttttcggcacccgtctgggcattcagcgcatgaaaaataaaggcttgggcgctagcatcatcaatatgagcagtattatggggctcgtaggcgctccgactgcaggggcatacaacgcttccaagggggcggtacgtatcatgtcgaaaagcgcagcgctggattgcgcactgaaggactacgatgtgcgtgtcaacacagtacatccgggcgcgatcaagaccccacggaaggatcagctggaaggttgggaggaagcaatgtcacagcgtacggcgacccctatgggccacattggcgaaccgaatgacatcgcatggatctgtgtgtacctggcatctgacgaatcgaaatttgcgacgggtgcagaatttgtggtcgacggcgggtggaccgcacag

SEQ ID NO: 194 - protein, 252 aa, Artificial Sequence
  Engineered Variant of Kred from Lactobacillus kefir
MTDRLKHKVAIVTGGTMGIGLAIADKFVEEGAKVVITGRHADVGEKAAKSIGGTDVIRFVQHDASEEAGWTKLFDTTEEAFGPVTTLVNNAGIGVIKSVERTTTEEWRKILSVNLDGVFFGTRLGIQRMKNKGLGASIINMSSIMGLVGAPTAGAYNASKGAVRIMSKSAALDCALKDYDVRVNTVHPGAIKTPRKDQLEGWEEAMSQRTATPMGHIGEPNDIAWICVYLASDESKFATGAEFVVDGGWTAQ

SEQ ID NO: 195 - DNA, 756 bp, Artificial Sequence
  Engineered Variant of Kred from Lactobacillus kefir
atgaccgatcgtctgaagcataaagtagccatcgttaccggcgggacaatgggtatcggtttggcaatcgccgataaatttgtagaggagggtgcgaaagtagttattactggtcgtcacgcggatgtaggtgaaaaagccgccaaatcaatcggcggcactgatgttattcgctttgtccagcacgatgcgtccgaagaagcaggctggacgaaactgttcgacaccaccgaggaggcattcggcccggttacgaccctggtgaacaatgcagggattggggtaattaagagcgttgaacggactaccacggaggaatggcgtaaaatcctgtccgttaatctggatggtgtttttttcggcacccgtctgggcattcagcgcatgaaaaataaaggcttgggcgctagcatcatcaatatgagcagtattatggggctcgtaggcgctccgactgcaggggcatacaacgcttccaagggggcggtacgtatcatgtcgaaaagcgcagcgctggattgcgcactgaaggactacgatgtgcgtgtcaacacagtacatccgggcgcgatcaagaccccacggaaggatcagctggaaggttgggaggaaatgatgtcacagcgtacggcgacccctatgggccacattggcgaaccgaatgacatcgcatggatctgtgtgtacctggcatctgacgaatcgaaatttgcgacgggtgcagaatttgtggtcgacggcgggtggaccgcacag

SEQ ID NO: 196 - protein, 252 aa, Artificial Sequence
  Engineered Variant of Kred from Lactobacillus kefir
MTDRLKHKVAIVTGGTMGIGLAIADKFVEEGAKVVITGRHADVGEKAAKSIGGTDVIRFVQHDASEEAGWTKLFDTTEEAFGPVTTLVNNAGIGVIKSVERTTTEEWRKILSVNLDGVFFGTRLGIQRMKNKGLGASIINMSSIMGLVGAPTAGAYNASKGAVRIMSKSAALDCALKDYDVRVNTVHPGAIKTPRKDQLEGWEEMMSQRTATPMGHIGEPNDIAWICVYLASDESKFATGAEFVVDGGWTAQ

SEQ ID NO: 197 - DNA, 756 bp, Artificial Sequence
  Engineered Variant of Kred from Lactobacillus kefir
atgaccgatcgtctgaagcataaagtagccatcgttaccggcgggacaatgggtatcggtttggcaatcgccgataaatttgtagaggagggtgcgaaagtagttattactggtcgtcacgcggatgtaggtgaaaaagccgccaaatcaatcggcggcactgatgttattcgctttgtccagcacgatgcgtccgaagaagcaggctggacgaaactgttcgacaccaccgaggaggcattcggcccggttacgaccctggtgaacaatgcagggattggggcaattgcgagcgttgaacggactaccacggaggaatggcgtaaaatcctgtccgttaatctggatggtgtttttttcggcacccgtctgggcattcagcgcatgaaaaataaaggcttgggcgctagcatcatcaatatgagcagtattatggggctcgtaggcgctccgactgcaggggcatacaacgcttccaagggggcggtacgtatcatgtcgaaaagcgcagcgctggattgcgcactgaaggactacgatgtgcgtgtcaacacagtacatccgggcgcgatcaagaccccacggaaggatcagctggaaggttgggaggaaatgatgtcacagcgtacgctgacccctatgggccacattggcgaaccgaatgacatcgcatggatctgtgtgtacctggcatctgacgaatcgaaatttgcgacgggtgcagaatttgtggtcgacggcgggtggaccgcacag

SEQ ID NO: 198 - protein, 252 aa, Artificial Sequence
  Engineered Variant of Kred from Lactobacillus kefir
MTDRLKHKVAIVTGGTMGIGLAIADKFVEEGAKVVITGRHADVGEKAAKSIGGTDVIRFVQHDASEEAGWTKLFDTTEEAFGPVTTLVNNAGIGAIASVERTTTEEWRKILSVNLDGVFFGTRLGIQRMKNKGLGASIINMSSIMGLVGAPTAGAYNASKGAVRIMSKSAALDCALKDYDVRVNTVHPGAIKTPRKDQLEGWEEMMSQRTLTPMGHIGEPNDIAWICVYLASDESKFATGAEFVVDGGWTAQ

SEQ ID NO: 199 - DNA, 756 bp, Artificial Sequence
  Engineered Variant of Kred from Lactobacillus kefir
atgaccgatcgtctgaagcataaagtagccatcgttaccggcgggacaatgggtatcggtttggcaatcgccgataaatttgtagaggagggtgcgaaagtagttattactggtcgtcacgcggatgtaggtgaaaaagccgccaaatcaatcggcggcactgatgttattcgctttgtccagcacgatgcgtccgaagaagcaggctggacgaaactgttcgacaccaccgaggaggcattcggcccggttacgaccctggtgaacaatgcagggattggggcaattaagagcgttgaacggactaccacggaggaatggcgtaaaatcctgtccgttaatctggatggtgtttttttcggcacccgtctgggcattcagcgcatgaaaaataaaggcttgggcgctagcatcatcaatatgagcagtattatggggctcgtaggcgctccgactgcaggggcatacaacgcttccaagggggcggtacgtatcatgtcgaaaagcgcagcgctggattgcgcactgaaggactacgatgtgcgtgtcaacacagtacatccgggcgcgatcaagaccccacggaaggatcagctggaaggttgggaggaagcaatgtcacagcgtacggcgacccctatgggccacattggcgaaccgaatgacatcgcatggatctgtgtgtacctggcatctgacgaatcgaaatttgcgacgggtgcagaatttgtggtcgacggcgggtggaccgcacag

SEQ ID NO: 200 - protein, 252 aa, Artificial Sequence
  Engineered Variant of Kred from Lactobacillus kefir
MTDRLKHKVAIVTGGTMGIGLAIADKFVEEGAKVVITGRHADVGEKAAKSIGGTDVIRFVQHDASEEAGWTKLFDTTEEAFGPVTTLVNNAGIGAIKSVERTTTEEWRKILSVNLDGVFFGTRLGIQRMKNKGLGASIINMSSIMGLVGAPTAGAYNASKGAVRIMSKSAALDCALKDYDVRVNTVHPGAIKTPRKDQLEGWEEAMSQRTATPMGHIGEPNDIAWICVYLASDESKFATGAEFVVDGGWTAQ

SEQ ID NO: 201 - DNA, 756 bp, Artificial Sequence
  Engineered Variant of Kred from Lactobacillus kefir
atgaccgatcgtctgaagcataaagtagccatcgttaccggcgggacaatgggtatcggtttggcaatcgccgataaatttgtagaggagggtgcgaaagtagttattactggtcgtcacgcggatgtaggtgaaaaagccgccaaatcaatcggcggcactgatgttattcgctttgtccagcacgatgcgtccgaagaagcaggctggacgaaactgttcgacaccaccgaggaggcattcggcccggttacgaccctggtgaacaatgcagggattggggtaattgcgagcgttgaacggactaccacggaggaatggcgtaaaatcctgtccgttaatctggatggtgtttttttcggcacccgtctgggcattcagcgcatgaaaaataaaggcttgggcgctagcatcatcaatatgagcagtattatggggctcgtaggcgctccgactgcaggggcatacaacgcttccaagggggcggtacgtatcatgtcgaaaagcgcagcgctggattgcgcactgaaggactacgatgtgcgtgtcaacacagtacatccgggcgcgatcaagaccccacggaaggatcagctggaaggttgggaggaaatgatgtcacagcgtacgctgacccctatgggccacattggcgaaccgaatgacatcgcatggatctgtgtgtacctggcatctgacgaatcgaaatttgcgacgggtgcagaatttgtggtcgacggcgggtggaccgcacag

SEQ ID NO: 202 - protein, 252 aa, Artificial Sequence
  Engineered Variant of Kred from Lactobacillus kefir
MTDRLKHKVAIVTGGTMGIGLAIADKFVEEGAKVVITGRHADVGEKAAKSIGGTDVIRFVQHDASEEAGWTKLFDTTEEAFGPVTTLVNNAGIGVIASVERTTTEEWRKILSVNLDGVFFGTRLGIQRMKNKGLGASIINMSSIMGLVGAPTAGAYNASKGAVRIMSKSAALDCALKDYDVRVNTVHPGAIKTPRKDQLEGWEEMMSQRTLTPMGHIGEPNDIAWICVYLASDESKFATGAEFVVDGGWTAQ

SEQ ID NO: 203 - DNA, 756 bp, Artificial Sequence
  Engineered Variant of Kred from Lactobacillus kefir
atgaccgatcgtctgaagcataaagtagccatcgttaccggcgggacaatgggtatcggtttggcaatcgccgataaatttgtagaggagggtgcgaaagtagttattactggtcgtcacgcggatgtaggtgaaaaagccgccaaatcaatcggcggcactgatgttattcgctttgtccagcacgatgcgtccgaagaagcaggctggacgaaactgttcgacaccaccgaggaggcattcggcccggttacgaccctggtgaacaatgcagggattggggttattaaaagcgttgaacggactaccacggaggaatggcgtaaaatcctgtccgttaatctggatggtgtttttttcggcacccgtctgggcattcagcgcatgaaaaataaaggcttgggcgctagcatcatcaatatgagctcgatcgcggggctcgtaggcgatccgactgcaggggcatacaacgcttccaagggggcggtacgtatcatgtcgaaaagcgcagcgctggattgcgcactgaaggactacgatgtgcgtgtcaacacagtacatccgggcgcgatcaagaccccacggaaggatcagctggaaggttgggaggaaatgatgtcacagcgtacggcgacccctatgggccacattggcgaaccgaatgacatcgcatggatctgtgtgtacctggcatctgacgaatcgaaatttgcgacgggtgcagaatttgtggtcgacggcgggtggaccgcacag

SEQ ID NO: 204 - protein, 252 aa, Artificial Sequence
  Engineered Variant of Kred from Lactobacillus kefir
MTDRLKHKVAIVTGGTMGIGLAIADKFVEEGAKVVITGRHADVGEKAAKSIGGTDVIRFVQHDASEEAGWTKLFDTTEEAFGPVTTLVNNAGIGVIKSVERTTTEEWRKILSVNLDGVFFGTRLGIQRMKNKGLGASIINMSSIAGLVGDPTAGAYNASKGAVRIMSKSAALDCALKDYDVRVNTVHPGAIKTPRKDQLEGWEEMMSQRTATPMGHIGEPNDIAWICVYLASDESKFATGAEFVVDGGWTAQ

SEQ ID NO: 205 - DNA, 756 bp, Artificial Sequence
  Engineered Variant of Kred from Lactobacillus kefir
atgaccgatcgtctgaagcataaagtagccatcgttaccggcgggacaatgggtatcggtttggcaatcgccgataaatttgtagaggagggtgcgaaagtagttattactggtcgtcacgcggatgtaggtgaaaaagccgccaaatcaatcggcggcactgatgttattcgctttgtccagcacgatgcgtccgaagaagcaggctggacgaaactgttcgacaccaccgaggaggcattcggcccggttacgaccctggtgaacaatgcagggattggggtagccaagagcgttgaacggactaccacggaggaatggcgtaaaatcctgtccgttaatctggatggtgtttttttcggcacccgtctgggcattcagcgcatgaaaaataaaggcttgggcgctagcatcatcaatatgagcagtattatggggctcgtaggcgctccgactgcaggggcatacaacgcttccaagggggcggtacgtatcatgtcgaaaagcgcagcgctggattgcgcactgaaggactacgatgtgcgtgtcaacacagtacatccgggcgcgatcaagaccccacggaaggatcagctggaaggttgggaggaaatgatgtcacagcgtacgctgacccctatgggccacattggcgaaccgaatgacatcgcatggatctgtgtgtacctggcatctgacgaatcgaaatttgcgacgggtgcagaatttgtggtcgacggcgggtggaccgcacag

SEQ ID NO: 206 - protein, 252 aa, Artificial Sequence
  Engineered Variant of Kred from Lactobacillus kefir
MTDRLKHKVAIVTGGTMGIGLAIADKFVEEGAKVVITGRHADVGEKAAKSIGGTDVIRFVQHDASEEAGWTKLFDTTEEAFGPVTTLVNNAGIGVAKSVERTTTEEWRKILSVNLDGVFFGTRLGIQRMKNKGLGASIINMSSIMGLVGAPTAGAYNASKGAVRIMSKSAALDCALKDYDVRVNTVHPGAIKTPRKDQLEGWEEMMSQRTLTPMGHIGEPNDIAWICVYLASDESKFATGAEFVVDGGWTAQ

SEQ ID NO: 207 - DNA, 756 bp, Artificial Sequence
  Engineered Variant of Kred from Lactobacillus kefir
atgaccgatcgtctgaagcataaagtagccatcgttaccggcgggacaatgggtatcggtttggcaatcgccgataaatttgtagaggagggtgcgaaagtagttattactggtcgtcacgcggatgtaggtgaaaaagccgccaaatcaatcggcggcactgatgttattcgctttgtccagcacgatgcgtccgaagaagcaggctggacgaaactgttcgacaccaccgaggaggcattcggcccggttacgaccctggtgaacaatgcagggattggggtaattgcgagcgttgaacggactaccacggaggaatggcgtaaaatcctgtccgttaatctggatggtgtttttttcggcacccgtctgggcattcagcgcatgaaaaataaaggcttgggcgctagcatcatcaatatgagcagtattatggggctcgtaggcgctccgactgcaggggcatacaacgcttccaagggggcggtacgtatcatgtcgaaaagcgcagcgctggattgcgcactgaaggactacgatgtgcgtgtcaacacagtacatccgggcgcgatcaagaccccacggaaggatcagctggaaggttgggaggaagcaatgtcacagcgtacggcgacccctatgggccacattggcgaaccgaatgacatcgcatggatctgtgtgtacctggcatctgacgaatcgaaatttgcgacgggtgcagaatttgtggtcgacggcgggtggaccgcacag

SEQ ID NO: 208 - protein, 252 aa, Artificial Sequence
  Engineered Variant of Kred from Lactobacillus kefir
MTDRLKHKVAIVTGGTMGIGLAIADKFVEEGAKVVITGRHADVGEKAAKSIGGTDVIRFVQHDASEEAGWTKLFDTTEEAFGPVTTLVNNAGIGVIASVERTTTEEWRKILSVNLDGVFFGTRLGIQRMKNKGLGASIINMSSIMGLVGAPTAGAYNASKGAVRIMSKSAALDCALKDYDVRVNTVHPGAIKTPRKDQLEGWEEAMSQRTATPMGHIGEPNDIAWICVYLASDESKFATGAEFVVDGGWTAQ

SEQ ID NO: 209 - DNA, 756 bp, Artificial Sequence
  Engineered Variant of Kred from Lactobacillus kefir
atgaccgatcgtctgaagcataaagtagccatcgttaccggcgggacaatgggtatcggtttggcaatcgccgataaatttgtagaggagggtgcgaaagtagttattactggtcgtcacgcggatgtaggtgaaaaagccgccaaatcaatcggcggcactgatgttattcgctttgtccagcacgatgcgtccgaagaagcaggctggacgaaactgttcgacaccaccgaggaggcattcggcccggttacgaccctggtgaacaatgcagggattggggcaattaagagcgttgaacggactaccacggaggaatggcgtaaaatcctgtccgttaatctggatggtgtttttttcggcacccgtctgggcattcagcgcatgaaaaataaaggcttgggcgctagcatcatcaatatgagcagtattatggggctcgtaggcgctccgactgcaggggcatacaacgcttccaagggggcggtacgtatcatgtcgaaaagcgcagcgctggattgcgcactgaaggactacgatgtgcgtgtcaacacagtacatccgggcgcgatcaagaccccacggaaggatcagctggaaggttgggaggaagcagcttcacagcgtacggcgacccctatgggccacattggcgaaccgaatgacatcgcatggatctgtgtgtacctggcatctgacgaatcgaaatttgcgacgggtgcagaatttgtggtcgacggcgggtggaccgcacag

SEQ ID NO: 210 - protein, 252 aa, Artificial Sequence
  Engineered Variant of Kred from Lactobacillus kefir
MTDRLKHKVAIVTGGTMGIGLAIADKFVEEGAKVVITGRHADVGEKAAKSIGGTDVIRFVQHDASEEAGWTKLFDTTEEAFGPVTTLVNNAGIGAIKSVERTTTEEWRKILSVNLDGVFFGTRLGIQRMKNKGLGASIINMSSIMGLVGAPTAGAYNASKGAVRIMSKSAALDCALKDYDVRVNTVHPGAIKTPRKDQLEGWEEAASQRTATPMGHIGEPNDIAWICVYLASDESKFATGAEFVVDGGWTAQ

SEQ ID NO: 211 - DNA, 756 bp, Artificial Sequence
  Engineered Variant of Kred from Lactobacillus kefir
atgaccgatcgtctgaagcataaagtagccatcgttaccggcgggacaatgggtatcggtttggcaatcgccgataaatttgtagaggagggtgcgaaagtagttattactggtcgtcacgcggatgtaggtgaaaaagccgccaaatcaatcggcggcactgatgttattcgctttgtccagcacgatgcgtccgaagaagcaggctggacgaaactgttcgacaccaccgaggaggcattcggcccggttacgaccctggtgaacaatgcagggattggggtaattgcgagcgttgaacggactaccacggaggaatggcgtaaaatcctgtccgttaatctggatggtgtttttttcggcacccgtctgggcattcagcgcatgaaaaataaaggcttgggcgctagcatcatcaatatgagctcgatcatggggctcgtaggcgctccgactgcaggggcatacaacgcttccaagggggcggtacgtatcatgtcgaaaagcgcagcgctggattgcgcactgaaggactacgatgtgcgtgtcaacacagtacatccgggcgcgatcaagaccccacggaaggatcagctggaaggttgggaggaagcaatgtcacagcgtacgctgacccctatgggccacattggcgaaccgaatgacatcgcatggatctgtgtgtacctggcatctgacgaatcgaaatttgcgacgggtgcagaatttgtggtcgacggcgggtggaccgcacag

SEQ ID NO: 212 - protein, 252 aa, Artificial Sequence
  Engineered Variant of Kred from Lactobacillus kefir
MTDRLKHKVAIVTGGTMGIGLAIADKFVEEGAKVVITGRHADVGEKAAKSIGGTDVIRFVQHDASEEAGWTKLFDTTEEAFGPVTTLVNNAGIGVIASVERTTTEEWRKILSVNLDGVFFGTRLGIQRMKNKGLGASIINMSSIMGLVGAPTAGAYNASKGAVRIMSKSAALDCALKDYDVRVNTVHPGAIKTPRKDQLEGWEEAMSQRTLTPMGHIGEPNDIAWICVYLASDESKFATGAEFVVDGGWTAQ

SEQ ID NO: 213 - DNA, 756 bp, Artificial Sequence
  Engineered Variant of Kred from Lactobacillus kefir
atgaccgatcgtctgaagcataaagtagccatcgttaccggcgggacaatgggtatcggtttggcaatcgccgataaatttgtagaggagggtgcgaaagtagttattactggtcgtcacgcggatgtaggtgaaaaagccgccaaatcaatcggcggcactgatgttattcgctttgtccagcacgatgcgtccgaagaagcaggctggacgaaactgttcgacaccaccgaggaggcattcggcccggttacgaccctggtgaacaatgcagggattggggttattaaaagcgttgaacggactaccacggaggaatggcgtaaaatcctgtccgttaatctggatggtgtttttttcggcacccgtctgggcattcagcgcatgaaaaataaaggcttgggcgctagcatcatcaatatgagctcgatcatggggctcgtaggcgctccgactgcaggggcatacaacgcttccaagggggcggtacgtatcatgtcgaaaagcgcagcgctggattgcgcactgaaggactacgatgtgcgtgtcaacacagtacatccgggcgcgatcaagaccccacggaaggatcagctggaaggttgggaggaaatggcttcacagcgtacggcgacccctatgggccacattggcgaaccgaatgacatcgcatggatctgtgtgtacctggcatctgacgaatcgaaatttgcgacgggtgcagaatttgtggtcgacggcgggtggaccgcacag

SEQ ID NO: 214 - protein, 252 aa, Artificial Sequence
  Engineered Variant of Kred from Lactobacillus kefir
MTDRLKHKVAIVTGGTMGIGLAIADKFVEEGAKVVITGRHADVGEKAAKSIGGTDVIRFVQHDASEEAGWTKLFDTTEEAFGPVTTLVNNAGIGVIKSVERTTTEEWRKILSVNLDGVFFGTRLGIQRMKNKGLGASIINMSSIMGLVGAPTAGAYNASKGAVRIMSKSAALDCALKDYDVRVNTVHPGAIKTPRKDQLEGWEEMASQRTATPMGHIGEPNDIAWICVYLASDESKFATGAEFVVDGGWTAQ

SEQ ID NO: 215 - DNA, 756 bp, Artificial Sequence
  Engineered Variant of Kred from Lactobacillus kefir
atgaccgatcgtctgaagcataaagtagccatcgttaccggcgggacaatgggtatcggtttggcaatcgccgataaatttgtagaggagggtgcgaaagtagttattactggtcgtcacgcggatgtaggtgaaaaagccgccaaatcaatcggcggcactgatgttattcgctttgtccagcacgatgcgtccgaagaagcaggctggacgaaactgttcgacaccaccgaggaggcattcggcccggttacgaccctggtgaacaatgcagggattggggttattaaaagcgttgaacggactaccacggaggaatggcgtaaaatcctgtccgttaatctggatggtgtttttttcggcacccgtctgggcattcagcgcatgaaaaataaaggcttgggcgctagcatcatcaatatgagcagtattatggggctcgtaggcgctccgactgcaggggcatacaacgcttccaagggggcggtacgtatcatgtcgaaaagcgcagcgctggattgcgcactgaaggactacgatgtgcgtgtcaacacagtacatccgggcgcgatcaagaccccacggaaggatcagctggaaggttgggaggaaatggcttcacagcgtacggcgacccctatgggccacattggcgaaccgaatgacatcgcatggatctgtgtgtacctggcatctgacgaatcgaaatttgcgacgggtgcagaatttgtggtcgacggcgggtggaccgcacag

SEQ ID NO: 216 - protein, 252 aa, Artificial Sequence; identical to SEQ ID NO: 214
  Engineered Variant of Kred from Lactobacillus kefir

SEQ ID NO: 217 - DNA, 756 bp, Artificial Sequence
  Engineered Variant of Kred from Lactobacillus kefir
atgaccgatcgtctgaagcataaagtagccatcgttaccggcgggacaatgggtatcggtttggcaatcgccgataaatttgtagaggagggtgcgaaagtagttattactggtcgtcacgcggatgtaggtgaaaaagccgccaaatcaatcggcggcactgatgttattcgctttgtccagcacgatgcgtccgaagaagcaggctggacgaaactgttcgacaccaccgaggaggcattcggcccggttacgaccctggtgaacaatgcagggattggggcagccgcgagcgttgaacggactaccacggaggaatggcgtaaaatcctgtccgttaatctggatggtgtttttttcggcacccgtctgggcattcagcgcatgaaaaataaaggcttgggcgctagcatcatcaatatgagcagtattatggggctcgtaggcgctccgactgcaggggcatacaacgcttccaagggggcggtacgtatcatgtcgaaaagcgcagcgctggattgcgcactgaaggactacgatgtgcgtgtcaacacagtacatccgggcgcgatcaagaccccacggaaggatcagctggaaggttgggaggaagcaatgtcacagcgtacgctgacccctatgggccacattggcgaaccgaatgacatcgcatggatctgtgtgtacctggcatctgacgaatcgaaatttgcgacgggtgcagaatttgtggtcgacggcgggtggaccgcacag

SEQ ID NO: 218 - protein, 252 aa, Artificial Sequence
  Engineered Variant of Kred from Lactobacillus kefir
MTDRLKHKVAIVTGGTMGIGLAIADKFVEEGAKVVITGRHADVGEKAAKSIGGTDVIRFVQHDASEEAGWTKLFDTTEEAFGPVTTLVNNAGIGAAASVERTTTEEWRKILSVNLDGVFFGTRLGIQRMKNKGLGASIINMSSIMGLVGAPTAGAYNASKGAVRIMSKSAALDCALKDYDVRVNTVHPGAIKTPRKDQLEGWEEAMSQRTLTPMGHIGEPNDIAWICVYLASDESKFATGAEFVVDGGWTAQ

SEQ ID NO: 219 - DNA, 756 bp, Artificial Sequence
  Engineered Variant of Kred from Lactobacillus kefir
atgaccgatcgtctgaagcataaagtagccatcgttaccggcgggacaatgggtatcggtttggcaatcgccgataaatttgtagaggagggtgcgaaagtagttattactggtcgtcacgcggatgtaggtgaaaaagccgccaaatcaatcggcggcactgatgttattcgctttgtccagcacgatgcgtccgaagaagcaggctggacgaaactgttcgacaccaccgaggaggcattcggcccggttacgaccctggtgaacaatgcagggattggggcaattgcgagcgttgaacggactaccacggaggaatggcgtaaaatcctgtccgttaatctggatggtgtttttttcggcacccgtctgggcattcagcgcatgaaaaataaaggcttgggcgctagcatcatcaatatgagcgcgatcgcggggctcgtaggcgctccgactgcaggggcatacaacgcttccaagggggcggtacgtatcatgtcgaaaagcgcagcgctggattgcgcactgaaggactacgatgtgcgtgtcaacacagtacatccgggcgcgatcaagaccccacggaaggatcagctggaaggtgctgaggaagcaatgtcacagcgtacgctgacccctatgggccacattggcgaaccgaatgacatcgcatggatctgtgtgtacctggcatctgacgaatcgaaatttgcgacgggtgcagaatttgtggtcgacggcgggtggaccgcacag

SEQ ID NO: 220 - protein, 252 aa, Artificial Sequence
  Engineered Variant of Kred from Lactobacillus kefir
MTDRLKHKVAIVTGGTMGIGLAIADKFVEEGAKVVITGRHADVGEKAAKSIGGTDVIRFVQHDASEEAGWTKLFDTTEEAFGPVTTLVNNAGIGAIASVERTTTEEWRKILSVNLDGVFFGTRLGIQRMKNKGLGASIINMSAIAGLVGAPTAGAYNASKGAVRIMSKSAALDCALKDYDVRVNTVHPGAIKTPRKDQLEGAEEAMSQRTLTPMGHIGEPNDIAWICVYLASDESKFATGAEFVVDGGWTAQ

SEQ ID NO: 221 - DNA, 756 bp, Artificial Sequence
  Engineered Variant of Kred from Lactobacillus kefir
atgaccgatcgtctgaagcataaagtagccatcgttaccggcgggacaatgggtatcggtttggcaatcgccgataaatttgtagaggagggtgcgaaagtagttattactggtcgtcacgcggatgtaggtgaaaaagccgccaaatcaatcggcggcactgatgttattcgctttgtccagcacgatgcgtccgaagaagcaggctggacgaaactgttcgacaccaccgaggaggcattcggcccggttacgaccctggtgaacaatgcagggattggggtaattgcgagcgttgaacggactaccacggaggaatggcgtaaaatcctgtccgttaatctggatggtgtttttttcggcacccgtctgggcattcagcgcatgaaaaataaaggcttgggcgctagcatcatcaatatgagcagtattatggggctcgtaggcgctccgactgcaggggcatacaacgcttccaagggggcggtacgtatcatgtcgaaaagcgcagcgctggattgcgcactgaaggactacgatgtgcgtgtcaacacagtacatccgggcgcgatcaagaccccacggaaggatcagctggaaggttgggaggaaatggcttcacagcgtacgctgacccctatgggccacattggcgaaccgaatgacatcgcatggatctgtgtgtacctggcatctgacgaatcgaaatttgcgacgggtgcagaatttgtggtcgacggcgggtggaccgcacag

SEQ ID NO: 222 - protein, 252 aa, Artificial Sequence
  Engineered Variant of Kred from Lactobacillus kefir
MTDRLKHKVAIVTGGTMGIGLAIADKFVEEGAKVVITGRHADVGEKAAKSIGGTDVIRFVQHDASEEAGWTKLFDTTEEAFGPVTTLVNNAGIGVIASVERTTTEEWRKILSVNLDGVFFGTRLGIQRMKNKGLGASIINMSSIMGLVGAPTAGAYNASKGAVRIMSKSAALDCALKDYDVRVNTVHPGAIKTPRKDQLEGWEEMASQRTLTPMGHIGEPNDIAWICVYLASDESKFATGAEFVVDGGWTAQ

SEQ ID NO: 223 - DNA, 756 bp, Artificial Sequence
  Engineered Variant of Kred from Lactobacillus kefir
atgaccgatcgtctgaagcataaagtagccatcgttaccggcgggacaatgggtatcggtttggcaatcgccgataaatttgtagaggagggtgcgaaagtagttattactggtcgtcacgcggatgtaggtgaaaaagccgccaaatcaatcggcggcactgatgttattcgctttgtccagcacgatgcgtccgaagaagcaggctggacgaaactgttcgacaccaccgaggaggcattcggcccggttacgaccctggtgaacaatgcagggattggggcaattgcgagcgttgaacggactaccacggaggaatggcgtaaaatcctgtccgttaatctggatggtgtttttttcggcacccgtctgggcattcagcgcatgaaaaataaaggcttgggcgctagcatcatcaatatgagcagtattatggggctcgtaggcgctccgactgcaggggcatacaacgcttccaagggggcggtacgtatcatgtcgaaaagcgcagcgctggattgcgcactgaaggactacgatgtgcgtgtcaacacagtacatccgggcgcgatcaagaccccacggaaggatcagctggaaggtgctgaggaagcagcttcacagcgtacgctgacccctatgggccacattggcgaaccgaatgacatcgcatggatctgtgtgtacctggcatctgacgaatcgaaatttgcgacgggtgcagaatttgtggtcgacggcgggtggaccgcacag

SEQ ID NO: 224 - protein, 252 aa, Artificial Sequence
  Engineered Variant of Kred from Lactobacillus kefir
MTDRLKHKVAIVTGGTMGIGLAIADKFVEEGAKVVITGRHADVGEKAAKSIGGTDVIRFVQHDASEEAGWTKLFDTTEEAFGPVTTLVNNAGIGAIASVERTTTEEWRKILSVNLDGVFFGTRLGIQRMKNKGLGASIINMSSIMGLVGAPTAGAYNASKGAVRIMSKSAALDCALKDYDVRVNTVHPGAIKTPRKDQLEGAEEAASQRTLTPMGHIGEPNDIAWICVYLASDESKFATGAEFVVDGGWTAQ

SEQ ID NO: 225 - DNA, 756 bp, Artificial Sequence
  Engineered Variant of Kred from Lactobacillus kefir
atgaccgatcgtctgaagcataaagtagccatcgttaccggcgggacaatgggtatcggtttggcaatcgccgataaatttgtagaggagggtgcgaaagtagttattactggtcgtcacgcggatgtaggtgaaaaagccgccaaatcaatcggcggcactgatgttattcgctttgtccagcacgatgcgtccgaagaagcaggctggacgaaactgttcgacaccaccgaggaggcattcggcccggttacgaccctggtgaacaatgcagggattggggtaattaagagcgttgaacggactaccacggaggaatggcgtaaaatcctgtccgttaatctggatggtgtttttttcggcacccgtctgggcattcagcgcatgaaaaataaaggcttgggcgctagcatcatcaatatgagcgcggcggcggggctcgtaggcgctccgactgcaggggcatacaacgcttccaagggggcggtacgtatcatgtcgaaaagcgcagcgctggattgcgcactgaaggactacgatgtgcgtgtcaacacagtacatccgggcgcgatcaagaccccacggaaggatcagctggaaggtgctgaggaagcaatgtcacagcgtacgctgacccctatgggccacattggcgaaccgaatgacatcgcatggatctgtgtgtacctggcatctgacgaatcgaaatttgcgacgggtgcagaatttgtggtcgacggcggggcaaccgcacag

SEQ ID NO: 226 - protein, 252 aa, Artificial Sequence
  Engineered Variant of Kred from Lactobacillus kefir
MTDRLKHKVAIVTGGTMGIGLAIADKFVEEGAKVVITGRHADVGEKAAKSIGGTDVIRFVQHDASEEAGWTKLFDTTEEAFGPVTTLVNNAGIGVIKSVERTTTEEWRKILSVNLDGVFFGTRLGIQRMKNKGLGASIINMSAAAGLVGAPTAGAYNASKGAVRIMSKSAALDCALKDYDVRVNTVHPGAIKTPRKDQLEGAEEAMSQRTLTPMGHIGEPNDIAWICVYLASDESKFATGAEFVVDGGATAQ

SEQ ID NO: 227 - DNA, 756 bp, Artificial Sequence
  Engineered Variant of Kred from Lactobacillus kefir
atgaccgatcgtctgaagcataaagtagccatcgttaccggcgggacaatgggtatcggtttggcaatcgccgataaatttgtagaggagggtgcgaaagtagttattactggtcgtcacgcggatgtaggtgaaaaagccgccaaatcaatcggcggcactgatgttattcgctttgtccagcacgatgcgtccgaagaagcaggctggacgaaactgttcgacaccaccgaggaggcattcggcccggttacgaccctggtgaacaatgcagggattggggttattaaaagcgttgaacggactaccacggaggaatggcgtaaaatcctgtccgttaatctggatggtgtttttttcggcacccgtctgggcattcagcgcatgaaaaataaaggcttgggcgctagcatcatcaatatgagcgcgatcgcggggctcgtaggcgctccgactgcaggggcatacaacgcttccaagggggcggtacgtatcatgtcgaaaagcgcagcgctggattgcgcactgaaggactacgatgtgcgtgtcaacacagtacatccgggcgcgatcaagaccccacggaaggatcagctggaaggttgggaggaaatgatgtcacagcgtacgctgacccctatgggccacattggcgaaccgaatgacatcgcatggatctgtgtgtacctggcatctgacgaatcgaaatttgcgacgggtgcagaatttgtggtcgacggcgggtggaccgcacag

SEQ ID NO: 228 - protein, 252 aa, Artificial Sequence
  Engineered Variant of Kred from Lactobacillus kefir
MTDRLKHKVAIVTGGTMGIGLAIADKFVEEGAKVVITGRHADVGEKAAKSIGGTDVIRFVQHDASEEAGWTKLFDTTEEAFGPVTTLVNNAGIGVIKSVERTTTEEWRKILSVNLDGVFFGTRLGIQRMKNKGLGASIINMSAIAGLVGAPTAGAYNASKGAVRIMSKSAALDCALKDYDVRVNTVHPGAIKTPRKDQLEGWEEMMSQRTLTPMGHIGEPNDIAWICVYLASDESKFATGAEFVVDGGWTAQ

SEQ ID NO: 229 - DNA, 756 bp, Artificial Sequence
  Engineered Variant of Kred from Lactobacillus kefir
atgaccgatcgtctgaagcataaagtagccatcgttaccggcgggacaatgggtatcggtttggcaatcgccgataaatttgtagaggagggtgcgaaagtagttattactggtcgtcacgcggatgtaggtgaaaaagccgccaaatcaatcggcggcactgatgttattcgctttgtccagcacgatgcgtccgaagaagcaggctggacgaaactgttcgacaccaccgaggaggcattcggcccggttacgaccctggtgaacaatgcagggattggggcaattgcgagcgttgaacggactaccacggaggaatggcgtaaaatcctgtccgttaatctggatggtgtttttttcggcacccgtctgggcattcagcgcatgaaaaataaaggcttgggcgctagcatcatcaatatgagcgcgatcgcggggctcgtaggcgctccgactgcaggggcatacaacgcttccaagggggcggtacgtatcatgtcgaaaagcgcagcgctggattgcgcactgaaggactacgatgtgcgtgtcaacacagtacatccgggcgcgatcaagaccccacggaaggatcagctggaaggttgggaggaaatgatgtcacagcgtacgctgacccctatgggccacattggcgaaccgaatgacatcgcatggatctgtgtgtacctggcatctgacgaatcgaaatttgcgacgggtgcagaatttgtggtcgacggcggggcaaccgcacag

SEQ ID NO: 230 - protein, 252 aa, Artificial Sequence
  Engineered Variant of Kred from Lactobacillus kefir
MTDRLKHKVAIVTGGTMGIGLAIADKFVEEGAKVVITGRHADVGEKAAKSIGGTDVIRFVQHDASEEAGWTKLFDTTEEAFGPVTTLVNNAGIGAIASVERTTTEEWRKILSVNLDGVFFGTRLGIQRMKNKGLGASIINMSAIAGLVGAPTAGAYNASKGAVRIMSKSAALDCALKDYDVRVNTVHPGAIKTPRKDQLEGWEEMMSQRTLTPMGHIGEPNDIAWICVYLASDESKFATGAEFVVDGGATAQ

SEQ ID NO: 231 - DNA, 756 bp, Artificial Sequence
  Engineered Variant of Kred from Lactobacillus kefir
atgaccgatcgtctgaagcataaagtagccatcgttaccggcgggacaatgggtatcggtttggcaatcgccgataaatttgtagaggagggtgcgaaagtagttattactggtcgtcacgcggatgtaggtgaaaaagccgccaaatcaatcggcggcactgatgttattcgctttgtccagcacgatgcgtccgaagaagcaggctggacgaaactgttcgacaccaccgaggaggcattcggcccggttacgaccctggtgaacaatgcagggattggggtagccaagagcgttgaacggactaccacggaggaatggcgtaaaatcctgtccgttaatctggatggtgtttttttcggcacccgtctgggcattcagcgcatgaaaaataaaggcttgggcgctagcatcatcaatatgagctcgatcatggggctcgtaggcgctccgactgcaggggcatacaacgcttccaagggggcggtacgtatcatgtcgaaaagcgcagcgctggattgcgcactgaaggactacgatgtgcgtgtcaacacagtacatccgggcgcgatcaagaccccacggaaggatcagctggaaggttgggaggaaatggcttcacagcgtacgctgacccctatgggccacattggcgaaccgaatgacatcgcatggatctgtgtgtacctggcatctgacgaatcgaaatttgcgacgggtgcagaatttgtggtcgacggcgggtggaccgcacag

SEQ ID NO: 232 - protein, 252 aa, Artificial Sequence
  Engineered Variant of Kred from Lactobacillus kefir
MTDRLKHKVAIVTGGTMGIGLAIADKFVEEGAKVVITGRHADVGEKAAKSIGGTDVIRFVQHDASEEAGWTKLFDTTEEAFGPVTTLVNNAGIGVAKSVERTTTEEWRKILSVNLDGVFFGTRLGIQRMKNKGLGASIINMSSIMGLVGAPTAGAYNASKGAVRIMSKSAALDCALKDYDVRVNTVHPGAIKTPRKDQLEGWEEMASQRTLTPMGHIGEPNDIAWICVYLASDESKFATGAEFVVDGGWTAQ

SEQ ID NO: 233 - DNA, 756 bp, Artificial Sequence
  Engineered Variant of Kred from Lactobacillus kefir
atgaccgatcgtctgaagcataaagtagccatcgttaccggcgggacaatgggtatcggtttggcaatcgccgataaatttgtagaggagggtgcgaaagtagttattactggtcgtcacgcggatgtaggtgaaaaagccgccaaatcaatcggcggcactgatgttattcgctttgtccagcacgatgcgtccgaagaagcaggctggacgaaactgttcgacaccaccgaggaggcattcggcccggttacgaccctggtgaacaatgcagggattggggtaattaagagcgttgaacggactaccacggaggaatggcgtaaaatcctgtccgttaatctggatggtgtttttttcggcacccgtctgggcattcagcgcatgaaaaataaaggcttgggcgctagcatcatcaatatgagctcggcgatggggctcgtaggcgctccgactgcaggggcatacaacgcttccaagggggcggtacgtatcatgtcgaaaagcgcagcgctggattgcgcactgaaggactacgatgtgcgtgtcaacacagtacatccgggcgcgatcaagaccccacggaaggatcagctggaaggtgctgaggaagcagcttcacagcgtacgctgacccctatgggccacattggcgaaccgaatgacatcgcatggatctgtgtgtacctggcatctgacgaatcgaaatttgcgacgggtgcagaatttgtggtcgacggcgggtggaccgcacag

SEQ ID NO: 234 - protein, 252 aa, Artificial Sequence
  Engineered Variant of Kred from Lactobacillus kefir
MTDRLKHKVAIVTGGTMGIGLAIADKFVEEGAKVVITGRHADVGEKAAKSIGGTDVIRFVQHDASEEAGWTKLFDTTEEAFGPVTTLVNNAGIGVIKSVERTTTEEWRKILSVNLDGVFFGTRLGIQRMKNKGLGASIINMSSAMGLVGAPTAGAYNASKGAVRIMSKSAALDCALKDYDVRVNTVHPGAIKTPRKDQLEGAEEAASQRTLTPMGHIGEPNDIAWICVYLASDESKFATGAEFVVDGGWTAQ

SEQ ID NO: 235 - DNA, 756 bp, Artificial Sequence
  Engineered Variant of Kred from Lactobacillus kefir
atgaccgatcgtctgaagcataaagtagccatcgttaccggcgggacaatgggtatcggtttggcaatcgccgataaatttgtagaggagggtgcgaaagtagttattactggtcgtcacgcggatgtaggtgaaaaagccgccaaatcaatcggcggcactgatgttattcgctttgtccagcacgatgcgtccgaagaagcaggctggacgaaactgttcgacaccaccgaggaggcattcggcccggttacgaccctggtgaacaatgcagggattggggcagccaagagcgttgaacggactaccacggaggaatggcgtaaaatcctgtccgttaatctggatggtgtttttttcggcacccgtctgggcattcagcgcatgaaaaataaaggcttgggcgctagcatcatcaatatgagcagtattatggggctcgtaggcgctccgactgcaggggcatacaacgcttccaagggggcggtacgtatcatgtcgaaaagcgcagcgctggattgcgcactgaaggactacgatgtgcgtgtcaacacagtacatccgggcgcgatcaagaccccacggaaggatcagctggaaggttgggaggaagcagcttcacagcgtacggcgacccctatgggccacattggcgaaccgaatgacatcgcatggatctgtgtgtacctggcatctgacgaatcgaaatttgcgacgggtgcagaatttgtggtcgacggcggggcaaccgcacag

SEQ ID NO: 236 - protein, 252 aa, Artificial Sequence
  Engineered Variant of Kred from Lactobacillus kefir
MTDRLKHKVAIVTGGTMGIGLAIADKFVEEGAKVVITGRHADVGEKAAKSIGGTDVIRFVQHDASEEAGWTKLFDTTEEAFGPVTTLVNNAGIGAAKSVERTTTEEWRKILSVNLDGVFFGTRLGIQRMKNKGLGASIINMSSIMGLVGAPTAGAYNASKGAVRIMSKSAALDCALKDYDVRVNTVHPGAIKTPRKDQLEGWEEAASQRTATPMGHIGEPNDIAWICVYLASDESKFATGAEFVVDGGATAQ

SEQ ID NO: 237 - DNA, 756 bp, Artificial Sequence
  Engineered Variant of Kred from Lactobacillus kefir
atgaccgatcgtctgaagcataaagtagccatcgttaccggcgggacaatgggtatcggtttggcaatcgccgataaatttgtagaggagggtgcgaaagtagttattactggtcgtcacgcggatgtaggtgaaaaagccgccaaatcaatcggcggcactgatgttattcgctttgtccagcacgatgcgtccgaagaagcaggctggacgaaactgttcgacaccaccgaggaggcattcggcccggttacgaccctggtgaacaatgcagggattggggcaattaagagcgttgaacggactaccacggaggaatggcgtaaaatcctgtccgttaatctggatggtgtttttttcggcacccgtctgggcattcagcgcatgaaaaataaaggcttgggcgctagcatcatcaatatgagctcgatcatggggctcgtaggcgctccgactgcaggggcatacaacgcttccaagggggcggtacgtatcatgtcgaaaagcgcagcgctggattgcgcactgaaggactacgatgtgcgtgtcaacacagtacatccgggcgcgatcaagaccccacggaaggatcagctggaaggttgggaggaaatggcttcacagcgtacgctgacccctatgggccacattggcgaaccgaatgacatcgcatggatctgtgtgtacctggcatctgacgaatcgaaatttgcgacgggtgcagaatttgtggtcgacggcggggcaaccgcacag

SEQ ID NO: 238 - protein, 252 aa, Artificial Sequence
  Engineered Variant of Kred from Lactobacillus kefir
MTDRLKHKVAIVTGGTMGIGLAIADKFVEEGAKVVITGRHADVGEKAAKSIGGTDVIRFVQHDASEEAGWTKLFDTTEEAFGPVTTLVNNAGIGAIKSVERTTTEEWRKILSVNLDGVFFGTRLGIQRMKNKGLGASIINMSSIMGLVGAPTAGAYNASKGAVRIMSKSAALDCALKDYDVRVNTVHPGAIKTPRKDQLEGWEEMASQRTLTPMGHIGEPNDIAWICVYLASDESKFATGAEFVVDGGATAQ

SEQ ID NO: 239 - DNA, 756 bp, Artificial Sequence
  Engineered Variant of Kred from Lactobacillus kefir
atgaccgatcgtctgaagcataaagtagccatcgttaccggcgggacaatgggtatcggtttggcaatcgccgataaatttgtagaggagggtgcgaaagtagttattactggtcgtcacgcggatgtaggtgaaaaagccgccaaatcaatcggcggcactgatgttattcgctttgtccagcacgatgcgtccgaagaagcaggctggacgaaactgttcgacaccaccgaggaggcattcggcccggttacgaccctggtgaacaatgcagggattggggttattaaaagcgttgaacggactaccacggaggaatggcgtaaaatcctgtccgttaatctggatggtgtttttttcggcacccgtctgggcattcagcgcatgaaaaataaaggcttgggcgctagcatcatcaatatgagctcggcggcggggctcgtaggcgctccgactgcaggggcatacaacgcttccaagggggcggtacgtatcatgtcgaaaagcgcagcgctggattgcgcactgaaggactacgatgtgcgtgtcaacacagtacatccgggcgcgatcaagaccccacggaaggatcagctggaaggttgggaggaagcagcttcacagcgtacgctgacccctatgggccacattggcgaaccgaatgacatcgcatggatctgtgtgtacctggcatctgacgaatcgaaatttgcgacgggtgcagaatttgtggtcgacggcgggtggaccgcacag

SEQ ID NO: 240 - protein, 252 aa, Artificial Sequence
  Engineered Variant of Kred from Lactobacillus kefir
MTDRLKHKVAIVTGGTMGIGLAIADKFVEEGAKVVITGRHADVGEKAAKSIGGTDVIRFVQHDASEEAGWTKLFDTTEEAFGPVTTLVNNAGIGVIKSVERTTTEEWRKILSVNLDGVFFGTRLGIQRMKNKGLGASIINMSSAAGLVGAPTAGAYNASKGAVRIMSKSAALDCALKDYDVRVNTVHPGAIKTPRKDQLEGWEEAASQRTLTPMGHIGEPNDIAWICVYLASDESKFATGAEFVVDGGWTAQ

SEQ ID NO: 241 - DNA, 756 bp, Artificial Sequence
  Engineered Variant of Kred from Lactobacillus kefir
atgaccgatcgtctgaagcataaagtagccatcgttaccggcgggacaatgggtatcggtttggcaatcgccgataaatttgtagaggagggtgcgaaagtagttattactggtcgtcacgcggatgtaggtgaaaaagccgccaaatcaatcggcggcactgatgttattcgctttgtccagcacgatgcgtccgaagaagcaggctggacgaaactgttcgacaccaccgaggaggcattcggcccggttacgaccctggtgaacaatgcagggattggggttattaaaagcgttgaacggactaccacggaggaatggcgtaaaatcctgtccgttaatctggatggtgtttttttcggcacccgtctgggcattcagcgcatgaaaaataaaggcttgggcgctagcatcatcaatatgagctcgatcgcggggctcgtaggcgctccgactgcaggggcatacaacgcttccaagggggcggtacgtatcatgtcgaaaagcgcagcgctggattgcgcactgaaggactacgatgtgcgtgtcaacacagtacatccgggcgcgatcaagaccccacggaaggatcagctggaaggttgggaggaaatggcttcacagcgtacgctgacccctatgggccacattggcgaaccgaatgacatcgcatggatctgtgtgtacctggcatctgacgaatcgaaatttgcgacgggtgcagaatttgtggtcgacggcggggcaaccgcacag

SEQ ID NO: 242 - protein, 252 aa, Artificial Sequence
  Engineered Variant of Kred from Lactobacillus kefir
MTDRLKHKVAIVTGGTMGIGLAIADKFVEEGAKVVITGRHADVGEKAAKSIGGTDVIRFVQHDASEEAGWTKLFDTTEEAFGPVTTLVNNAGIGVIKSVERTTTEEWRKILSVNLDGVFFGTRLGIQRMKNKGLGASIINMSSIAGLVGAPTAGAYNASKGAVRIMSKSAALDCALKDYDVRVNTVHPGAIKTPRKDQLEGWEEMASQRTLTPMGHIGEPNDIAWICVYLASDESKFATGAEFVVDGGATAQ

SEQ ID NO: 243 - DNA, 756 bp, Artificial Sequence
  Engineered Variant of Kred from Lactobacillus kefir
atgaccgatcgtctgaagcataaagtagccatcgttaccggcgggacaatgggtatcggtttggcaatcgccgataaatttgtagaggagggtgcgaaagtagttattactggtcgtcacgcggatgtaggtgaaaaagccgccaaatcaatcggcggcactgatgttattcgctttgtccagcacgatgcgtccgaagaagcaggctggacgaaactgttcgacaccaccgaggaggcattcggcccggttacgaccctggtgaacaatgcagggattggggttattaaaagcgttgaacggactaccacggaggaatggcgtaaaatcctgtccgttaatctggatggtgtttttttcggcacccgtctgggcattcagcgcatgaaaaataaaggcttgggcgctagcatcatcaatatgagcagtattatggggctcgtaggcgctccgactgcaggggcatacaacgcttccaagggggcggtacgtatcatgtcgaaaagcgcagcgctggattgcgcactgaaggactacgatgtgcgtgtcaacacagtacatccgggcgcgatcaagaccccacggaaggatcagctggaaggttgggaggaaatgatgtcacagcgtacgctgacccctatgggccacattggcgaaccgaatgacatcgcatggatctgtgtgtacctggcatctgacgaatcgaaatttgcgacgggtgcagaatttgtggtcgacggcggggcaaccgcacag

SEQ ID NO: 244 - protein, 252 aa, Artificial Sequence
  Engineered Variant of Kred from Lactobacillus kefir
MTDRLKHKVAIVTGGTMGIGLAIADKFVEEGAKVVITGRHADVGEKAAKSIGGTDVIRFVQHDASEEAGWTKLFDTTEEAFGPVTTLVNNAGIGVIKSVERTTTEEWRKILSVNLDGVFFGTRLGIQRMKNKGLGASIINMSSIMGLVGAPTAGAYNASKGAVRIMSKSAALDCALKDYDVRVNTVHPGAIKTPRKDQLEGWEEMMSQRTLTPMGHIGEPNDIAWICVYLASDESKFATGAEFVVDGGATAQ

SEQ ID NO: 245 - DNA, 756 bp, Artificial Sequence
  Engineered Variant of Kred from Lactobacillus kefir
atgaccgatcgtctgaagcataaagtagccatcgttaccggcgggacaatgggtatcggtttggcaatcgccgataaatttgtagaggagggtgcgaaagtagttattactggtcgtcacgcggatgtaggtgaaaaagccgccaaatcaatcggcggcactgatgttattcgctttgtccagcacgatgcgtccgaagaagcaggctggacgaaactgttcgacaccaccgaggaggcattcggcccggttacgaccctggtgaacaatgcagggattggggttattaaaagcgttgaacggactaccacggaggaatggcgtaaaatcctgtccgttaatctggatggtgtttttttcggcacccgtctgggcattcagcgcatgaaaaataaaggcttgggcgctagcatcatcaatatgagctcggcgatggggctcgtaggcgctccgactgcaggggcatacaacgcttccaagggggcggtacgtatcatgtcgaaaagcgcagcgctggattgcgcactgaaggactacgatgtgcgtgtcaacacagtacatccgggcgcgatcaagaccccacggaaggatcagctggaaggttgggaggaaatgatgtcacagcgtacgctgacccctatgggccacattggcgaaccgaatgacatcgcatggatctgtgtgtacctggcatctgacgaatcgaaatttgcgacgggtgcagaatttgtggtcgacggcgggtggaccgcacag

SEQ ID NO: 246 - protein, 252 aa, Artificial Sequence
  Engineered Variant of Kred from Lactobacillus kefir
MTDRLKHKVAIVTGGTMGIGLAIADKFVEEGAKVVITGRHADVGEKAAKSIGGTDVIRFVQHDASEEAGWTKLFDTTEEAFGPVTTLVNNAGIGVIKSVERTTTEEWRKILSVNLDGVFFGTRLGIQRMKNKGLGASIINMSSAMGLVGAPTAGAYNASKGAVRIMSKSAALDCALKDYDVRVNTVHPGAIKTPRKDQLEGWEEMMSQRTLTPMGHIGEPNDIAWICVYLASDESKFATGAEFVVDGGWTAQ

SEQ ID NO: 247 - DNA, 756 bp, Artificial Sequence
  Engineered Variant of Kred from Lactobacillus kefir
atgaccgatcgtctgaagcataaagtagccatcgttaccggcgggacaatgggtatcggtttggcaatcgccgataaatttgtagaggagggtgcgaaagtagttattactggtcgtcacgcggatgtaggtgaaaaagccgccaaatcaatcggcggcactgatgttattcgctttgtccagcacgatgcgtccgaagaagcaggctggacgaaactgttcgacaccaccgaggaggcattcggcccggttacgaccctggtgaacaatgcagggattggggttattaaaagcgttgaacggactaccacggaggaatggcgtaaaatcctgtccgttaatctggatggtgtttttttcggcacccgtctgggcattcagcgcatgaaaaataaaggcttgggcgctagcatcatcaatatgagcagtattatggggctcgtaggcgctccgactgcaggggcatacaacgcttccaagggggcggtacgtatcatgtcgaaaagcgcagcgctggattgcgcactgaaggactacgatgtgcgtgtcaacacagtacatccgggcgcgatcaagaccccacggaaggatcagctggaaggtgctgaggaaatggcttcacagcgtacgctgacccctatgggccacattggcgaaccgaatgacatcgcatggatctgtgtgtacctggcatctgacgaatcgaaatttgcgacgggtgcagaatttgtggtcgacggcggggcaaccgcacag

SEQ ID NO: 248 - protein, 252 aa, Artificial Sequence
  Engineered Variant of Kred from Lactobacillus kefir
MTDRLKHKVAIVTGGTMGIGLAIADKFVEEGAKVVITGRHADVGEKAAKSIGGTDVIRFVQHDASEEAGWTKLFDTTEEAFGPVTTLVNNAGIGVIKSVERTTTEEWRKILSVNLDGVFFGTRLGIQRMKNKGLGASIINMSSIMGLVGAPTAGAYNASKGAVRIMSKSAALDCALKDYDVRVNTVHPGAIKTPRKDQLEGAEEMASQRTLTPMGHIGEPNDIAWICVYLASDESKFATGAEFVVDGGATAQ

SEQ ID NO: 249 - DNA, 756 bp, Artificial Sequence
  Engineered Variant of Kred from Lactobacillus kefir
atgaccgatcgtctgaagcataaagtagccatcgttaccggcgggacaatgggtatcggtttggcaatcgccgataaatttgtagaggagggtgcgaaagtagttattactggtcgtcacgcggatgtaggtgaaaaagccgccaaatcaatcggcggcactgatgttattcgctttgtccagcacgatgcgtccgaagaagcaggctggacgaaactgttcgacaccaccgaggaggcattcggcccggttacgaccctggtgaacaatgcagggattggggcaattaagagcgttgaacggactaccacggaggaatggcgtaaaatcctgtccgttaatctggatggtgtttttttcggcacccgtctgggcattcagcgcatgaaaaataaaggcttgggcgctagcatcatcaatatgagcagtattatggggctcgtaggcgctccgactgcaggggcatacaacgcttccaagggggcggtacgtatcatgtcgaaaagcgcagcgctggattgcgcactgaaggactacgatgtgcgtgtcaacacagtacatccgggcgcgatcaagaccccacggaaggatcagctggaaggttgggaggaaatggcttcacagcgtacgctgacccctatgggccacattggcgaaccgaatgacatcgcatggatctgtgtgtacctggcatctgacgaatcgaaatttgcgacgggtgcagaatttgtggtcgacggcggggcaaccgcacag

SEQ ID NO: 250 - protein, 252 aa, Artificial Sequence; identical to SEQ ID NO: 238
  Engineered Variant of Kred from Lactobacillus kefir

SEQ ID NO: 251 - DNA, 756 bp, Artificial Sequence
  Engineered Variant of Kred from Lactobacillus kefir
atgaccgatcgtctgaagcataaagtagccatcgttaccggcgggacaatgggtatcggtttggcaatcgccgataaatttgtagaggagggtgcgaaagtagttattactggtcgtcacgcggatgtaggtgaaaaagccgccaaatcaatcggcggcactgatgttattcgctttgtccagcacgatgcgtccgaagaagcaggctggacgaaactgttcgacaccaccgaggaggcattcggcccggttacgaccctggtgaacaatgcagggattggggttattaaaagcgttgaacggactaccacggaggaatggcgtaaagttctgtccgttaatctggatggtgtttttttcggcacccgtctgggcattcagcgcatgaaaaataaaggcttgggcgctagcatcatcaatatgagcagtattatggggctcgtaggcgatccgactctgggggcatacaacgcttccaagggggcggtacgtatcatgtcgaaaagcgcagcgctggattgcgcactgaaggacatggatgtgcgtgtcaacacagtacatccgggcgcgatcaagaccgaacggaaggatcagctggaaggttgggaggaaatgatgtcacagcgtacgctgacccctatgggccacattggcgaaccgaatgacatcgcatggatctgtgtgtacctggcgtctgacgaatcgaaatttgcgacgggtgcagaatttgtggtcgacggcgggtggaccgcacag

SEQ ID NO: 252 - protein, 252 aa, Artificial Sequence
  Engineered Variant of Kred from Lactobacillus kefir
MTDRLKHKVAIVTGGTMGIGLAIADKFVEEGAKVVITGRHADVGEKAAKSIGGTDVIRFVQHDASEEAGWTKLFDTTEEAFGPVTTLVNNAGIGVIKSVERTTTEEWRKVLSVNLDGVFFGTRLGIQRMKNKGLGASIINMSSIMGLVGDPTLGAYNASKGAVRIMSKSAALDCALKDMDVRVNTVHPGAIKTERKDQLEGWEEMMSQRTLTPMGHIGEPNDIAWICVYLASDESKFATGAEFVVDGGWTAQ

SEQ ID NO: 253 - DNA, 756 bp, Artificial Sequence
  Engineered Variant of Kred from Lactobacillus kefir
atgaccgatcgtctgaagcataaagtagccatcgttaccggcgggacaatgggtatcggtttggcaatcgccgataaatttgtagaggagggtgcgaaagtagttattactggtcgtcacgcggatgtaggtgaaaaagccgccaaatcaatcggcggcactgatgttattcgctttgtccagcacgatgcgtccgaagaagcaggctggacgaaactgttcgacaccaccgaggaggcattcggcccggttacgaccctggtgaacaatgcagggattggggttattaaaagcgttgaacggactaccacggaggaatggcgtaaagtgctgtccgttaatctggatggtgtttttttcggcacccgtctgggcattcagcgcatgaaaaataaaggcttgggcgctagcatcatcaatatgagcagtattatggggctcgtaggcgatccgactctgggggcatacaacgcttccaagggggcggtacgtatcatgtcgaaaagcgcagcgctggattgcgcactgaaggactacgatgtgcgtgtcaacacagtacatccgggcgcgatcaagaccccacggaaggatcagctggaaggttgggaggaaatgatgtcacagcgtacgctgacccctatgggccacattggcgaaccgaatgacatcgcatggatctgtgtgtacctggcatctgacgaatcgaaatttgcgacgggtgcagaatttgtggtcgacggcgggtggaccgcacag

SEQ ID NO: 254 - protein, 252 aa, Artificial Sequence
  Engineered Variant of Kred from Lactobacillus kefir
MTDRLKHKVAIVTGGTMGIGLAIADKFVEEGAKVVITGRHADVGEKAAKSIGGTDVIRFVQHDASEEAGWTKLFDTTEEAFGPVTTLVNNAGIGVIKSVERTTTEEWRKVLSVNLDGVFFGTRLGIQRMKNKGLGASIINMSSIMGLVGDPTLGAYNASKGAVRIMSKSAALDCALKDYDVRVNTVHPGAIKTPRKDQLEGWEEMMSQRTLTPMGHIGEPNDIAWICVYLASDESKFATGAEFVVDGGWTAQ

SEQ ID NO: 255 - DNA, 756 bp, Artificial Sequence
  Engineered Variant of Kred from Lactobacillus kefir
atgaccgatcgtctgaagcataaagtagccatcgttaccggcgggacaatgggtatcggtttggcaatcgccgataaatttgtagaggagggtgcgaaagtagttattactggtcgtcacgcggatgtaggtgaaaaagccgccaaatcaatcggcggcactgatgttattcgctttgtccagcacgatgcgtccgaagaagcaggctggacgaagctgttcgacaccaccgaggaggcattcggcccggttacgaccctggtgaacaatgcagggattggggttattaaaagcgttgaacgtactcgcacggaggaatggcgtaaaatcctgtccgttaatctggatggtgtttttttcggcacccgtctgggcattcagcgcatgaaaaataaaggcttgggcgctagcatcatcaatatgagcagtattatggggattgtaggcgatccgactctgggggcatacaacgcttccaagggggcggtacgtatcatgtcgaaaagcgcagcgctggattgcgcactgaaggactacgatgtgcgtgtcaacacagtacatccgggcgcgatcaagaccccacggaaggatcagctggaaggttgggaggaaatgatgtcacagcgtacgctgacccctatgggccacattggcgaaccgaatgacatcgcatggatctgtgtgtacctggcatctgacgaatcgaaatttgcgacgggtgcagaatttgtggtcgacggcgggtggaccgcacag

SEQ ID NO: 256 - protein, 252 aa, Artificial Sequence
  Engineered Variant of Kred from Lactobacillus kefir
MTDRLKHKVAIVTGGTMGIGLAIADKFVEEGAKVVITGRHADVGEKAAKSIGGTDVIRFVQHDASEEAGWTKLFDTTEEAFGPVTTLVNNAGIGVIKSVERTRTEEWRKILSVNLDGVFFGTRLGIQRMKNKGLGASIINMSSIMGIVGDPTLGAYNASKGAVRIMSKSAALDCALKDYDVRVNTVHPGAIKTPRKDQLEGWEEMMSQRTLTPMGHIGEPNDIAWICVYLASDESKFATGAEFVVDGGWTAQ

SEQ ID NO: 257 - DNA, 756 bp, Artificial Sequence; identical to SEQ ID NO: 253
  Engineered Variant of Kred from Lactobacillus kefir

SEQ ID NO: 258 - protein, 252 aa, Artificial Sequence; identical to SEQ ID NO: 254
  Engineered Variant of Kred from Lactobacillus kefir

SEQ ID NO: 259 - DNA, 756 bp, Artificial Sequence
  Engineered Variant of Kred from Lactobacillus kefir
atgaccgatcgtctgaagcagaaagtagccatcgttaccggcgggacaatgggtatcggtttggcaatcgccgataaatttgtagaggagggtgcgaaagtagttattactggtcgtcacgcggatgtaggtgaaaaagccgccaaatcaatcggcggcactgatgttattcgctttgtccagcacgatgcgtccgaagaagcaggctggacgaagctgttcgacaccaccgaggaggcattcggcccggttacgaccctggtgaacaatgcagggattggggttattaaaagcgttgaacggactaccacggaggaatggcgtaaaatcctgtccgttaatctggatggtgtttttttcggcacccgtctgggcattcagcgcatgaaaaataaaggcttgggcgctagcatcatcaatatgagcagtattatggggattgtaggcgatccgactctgggggcatacaacgcttccaagggggcggtacgtatcatgtcgaaaagcgcagcgctggattgcgcactgaaggactacgatgtgcgtgtcaacacagtacatccgggcgcgatcaagaccccacggaaggatcagctggaaggttgggaggaaatgatgtcacagcgtacgctgacccctatgggccacattggcgaaccgaatgacatcgcatggatctgtgtgtacctggcatctgacgaatcgaaatttgcgacgggtgcagaatttgtggtcgacggcgggtggaccgcacag

SEQ ID NO: 260 - protein, 252 aa, Artificial Sequence
  Engineered Variant of Kred from Lactobacillus kefir
MTDRLKQKVAIVTGGTMGIGLAIADKFVEEGAKVVITGRHADVGEKAAKSIGGTDVIRFVQHDASEEAGWTKLFDTTEEAFGPVTTLVNNAGIGVIKSVERTTTEEWRKILSVNLDGVFFGTRLGIQRMKNKGLGASIINMSSIMGIVGDPTLGAYNASKGAVRIMSKSAALDCALKDYDVRVNTVHPGAIKTPRKDQLEGWEEMMSQRTLTPMGHIGEPNDIAWICVYLASDESKFATGAEFVVDGGWTAQ

SEQ ID NO: 261 - DNA, 756 bp, Artificial Sequence
  Engineered Variant of Kred from Lactobacillus kefir
atgaccgatcgtctgaagcataaagtagccatcgttaccggcgggacaatgggtatcggtttggcaatcgccgataaatttgtagaggagggtgcgaaagtagttattactggtcgtcacgcggatgtaggtgaaaaagccgccaaatcaatcggcggcactgatgttattcgctttgtccagcacgatgcgtccgaagaagcaggctggacgaaactgttcgacaccaccgaggaggcattcggcccggttacgaccctggtgaacaatgcagggattggggttattaaaagcgttgaacggactaccacggaggaatggcgtaaaatcctgtccgttaatctggatggtgtttttttcggcacccgtctgggcattcagcgcatgaaaaataaaggcttgggcgctagcatcatcaatatgagcagtattatggggctcgtaggcgatccgactctgggggcatacaacgcttccaagggggcggtacgtatcatgtcgaaaagcgcagcgctggattgcgcactgaaggactacgatgtgcgtgtcaacacagtacatccgggcgcgatcaagaccccacggaaggatcagctggaaggttgggaggaaatgatgtcacagcgtacgctgacccctatgggccacattggcgaaccgaatgacatcgcatggatctgtgtgtacctggcatctgacgaatcgaaatttgcgacgggtgcagaatttgtggtcgacggcgggtacaccgcacag

SEQ ID NO: 262 - protein, 252 aa, Artificial Sequence
  Engineered Variant of Kred from Lactobacillus kefir
MTDRLKHKVAIVTGGTMGIGLAIADKFVEEGAKVVITGRHADVGEKAAKSIGGTDVIRFVQHDASEEAGWTKLFDTTEEAFGPVTTLVNNAGIGVIKSVERTTTEEWRKILSVNLDGVFFGTRLGIQRMKNKGLGASIINMSSIMGLVGDPTLGAYNASKGAVRIMSKSAALDCALKDYDVRVNTVHPGAIKTPRKDQLEGWEEMMSQRTLTPMGHIGEPNDIAWICVYLASDESKFATGAEFVVDGGYTAQ

SEQ ID NO: 263 - DNA, 756 bp, Artificial Sequence
  Engineered Variant of Kred from Lactobacillus kefir
atgaccgatcgtctgaagcataaagtagccatcgttaccggcgggacaatgggtatcggtttggcaatcgccgataaatttgtagaggagggtgcgaaagtagttattactggtcgtcacgcggatgtaggtgaaaaagccgccaaatcaatcggcggcactgatgttattcgctttgtccagcacgatgcgtccgaagaagcaggctggacgaaactgttcgacaccaccgaggaggcattcggcccggttacgaccctggtgaacaatgcagggattggggttattaaaagcgttgaacggactaccacggaggaatggcgtaaaatcctgtccgttaatctggatggtgtttttttcggcacccgtctgggcattcagcgcatgaaaaataaaggcttgggcgctagcatcatcaatatgagcagtattatggggattgtaggcgatccgactctgggggcatacaacgcttccaagggggcggtacgtatcatgtcgaaaagcgcagcgctggattgcgcactgaaggactacgatgtgcgtgtcaacacagtacatccgggcgcgatcaagaccccacggaaggatcagctggaaggttgggaggaaatgatgtcacagcgtacgctgacccctatgggccacattggcgaaccgaatgacatcgcatggatctgtgtgtacctggcatctgacgaatcgaaatttgcgacgggtgcagaatttgtggtcgacggcgggtggaccgcacag

SEQ ID NO: 264 - protein, 252 aa, Artificial Sequence
  Engineered Variant of Kred from Lactobacillus kefir
MTDRLKHKVAIVTGGTMGIGLAIADKFVEEGAKVVITGRHADVGEKAAKSIGGTDVIRFVQHDASEEAGWTKLFDTTEEAFGPVTTLVNNAGIGVIKSVERTTTEEWRKILSVNLDGVFFGTRLGIQRMKNKGLGASIINMSSIMGIVGDPTLGAYNASKGAVRIMSKSAALDCALKDYDVRVNTVHPGAIKTPRKDQLEGWEEMMSQRTLTPMGHIGEPNDIAWICVYLASDESKFATGAEFVVDGGWTAQ

SEQ ID NO: 265 - DNA, 756 bp, Artificial Sequence
  Engineered Variant of Kred from Lactobacillus kefir
atgaccgatcgtctgaagcacaaagtagccatcatcaccggcgggacaatgggtatcggtttggcaatcgccgataaatttgtagaggagggtgcgaaagtagttattactggtcgtcacgcggatgtaggtgaaaaagccgccaaatcaatcggcggcactgatgttattcgctttgtccagcacgatgcgagcgaagaagcaggctggacgagtctgttcgacaccaccgaggaggcattcggcccggttacgaccctggtgaacaatgcagggattggggtaattaagagcgttgaacggactaccacggaggaatggcgtaaagttctgtccgttaatctggatggtgtttttttcggcacccgtctgggcattcagcgcatgaaaaataaaggcttgggcgctagcatcatcaatatgagcagtattatggggattgtaggcgctccgatggcaggggcatacaacgcttccaagggggcggtacgtatcatgtcgaaaagcgcagcgctggattgcgcactgaaggactacgatgtgcgtgtcaacacagtacatccgggcgcgatcaagaccccacggaaggatcagctggaaggttgggagcaggcaatgtcacagcgtacggcgacccctatgggccacattggcgaaccgaatgacatcgcatggatctgtgtgtacctggcatctgacgaatcgaaatttgcgacgggtgcagaatttgtggtcgacggcgggtggaccgcacag

SEQ ID NO: 266 - protein, 252 aa, Artificial Sequence
  Engineered Variant of Kred from Lactobacillus kefir
MTDRLKHKVAIITGGTMGIGLAIADKFVEEGAKVVITGRHADVGEKAAKSIGGTDVIRFVQHDASEEAGWTSLFDTTEEAFGPVTTLVNNAGIGVIKSVERTTTEEWRKVLSVNLDGVFFGTRLGIQRMKNKGLGASIINMSSIMGIVGAPMAGAYNASKGAVRIMSKSAALDCALKDYDVRVNTVHPGAIKTPRKDQLEGWEQAMSQRTATPMGHIGEPNDIAWICVYLASDESKFATGAEFVVDGGWTAQ

SEQ ID NO: 267 - DNA, 756 bp, Artificial Sequence
  Engineered Variant of Kred from Lactobacillus kefir
atgaccgaccgtctgaagcacaaagtagccatcatcaccggcgggacaatgggtatcggtttggcaatcgccgataaatttgtagaggagggtgcgaaagtagttattactggtcgtcacgcggatgtaggtgaaaaagccgccaaatcaatcggcggcactgatgttattcgctttgtccagcacgatgcgagcgaagaagcaggctggacgagtctgttcgacaccaccgaggaggcattcggcccggttacgaccctggtgaacaatgcagggattggggtaattaagagcgttgaatatactcagacggaggaatggcgtaaagttctgtccgttaatctggatggtgtttttttcggcacccgtctgggcattcagcgcatgaaaaataaaggcttgggcgctagcatcatcaatatgagcagtattatggggctggtaggcgctccgatggcaggggcatacaacgcttccaagggggcggtacgtatcatgtcgaaaagcgcagcgctggattgcgcactgaaggactacgatgtgcgtgtcaacacagtacatccgggcgcgatcaagaccccacggaaggatcagctggaaggttgggaggaagcaatgtcacagcgtacggcgacccctatgggccacattggcgaaccgaatgacatcgcatggatctgtgtgtacctggcatctgacgaatcgaaatttgcgacgggtgcagaatttgtggtcgacggcgggtacaccgcacag

SEQ ID NO: 268 - protein, 252 aa, Artificial Sequence
  Engineered Variant of Kred from Lactobacillus kefir
MTDRLKHKVAIITGGTMGIGLAIADKFVEEGAKVVITGRHADVGEKAAKSIGGTDVIRFVQHDASEEAGWTSLFDTTEEAFGPVTTLVNNAGIGVIKSVEYTQTEEWRKVLSVNLDGVFFGTRLGIQRMKNKGLGASIINMSSIMGLVGAPMAGAYNASKGAVRIMSKSAALDCALKDYDVRVNTVHPGAIKTPRKDQLEGWEEAMSQRTATPMGHIGEPNDIAWICVYLASDESKFATGAEFVVDGGYTAQ

SEQ ID NO: 269 - DNA, 756 bp, Artificial Sequence
  Engineered Variant of Kred from Lactobacillus kefir
atgaccgatcgtctgaagcacaaagtagccatcgtcaccggcgggacaatgggtatcggtttggcaatcgccgataaatttgtagaggagggtgcgaaagtagttattactggtcgtcacgcggatgtaggtctgaaagccgccaaatcaatcggtggcagtgatgttattcgctttgtccagcacgatgcgtccgaagaagcaggctggacgagtctgttcgacaccaccgaggaggcattcggcccggttacgaccctggtgaacaatgcagggattggggtaattaagagcgttgaacggactaccacggaggaatggcgtaaagttctgtccgttaatctggatggtgtttttttcggcacccgtctgggcattcagcgcatgaaaaataaaggcttgggcgctagcatcatcaatatgagcagtattatggggctggtaggcgctccgatggcaggggcatacaacgcttccaagggggcggtacgtatcatgtcgaaaagcgcagcgctggattgcgcactgaaggactacgatgtgcgtgtcaacacagtacatccgggcgcgatcaagaccgagcggaaggatcagctggaaggttgggagcaggcaatgtcacagcgtacggcgacccctatgggccacattggcgaaccgaatgacatcgcatggatctgtgtgtacctggcatctgacgaatcgaaatttgcgacgggtgcagaatttgtggtcgacggcgggtggaccgcacag

SEQ ID NO: 270 - protein, 252 aa, Artificial Sequence
  Engineered Variant of Kred from Lactobacillus kefir
MTDRLKHKVAIVTGGTMGIGLAIADKFVEEGAKVVITGRHADVGLKAAKSIGGSDVIRFVQHDASEEAGWTSLFDTTEEAFGPVTTLVNNAGIGVIKSVERTTTEEWRKVLSVNLDGVFFGTRLGIQRMKNKGLGASIINMSSIMGLVGAPMAGAYNASKGAVRIMSKSAALDCALKDYDVRVNTVHPGAIKTERKDQLEGWEQAMSQRTATPMGHIGEPNDIAWICVYLASDESKFATGAEFVVDGGWTAQ

SEQ ID NO: 271 - DNA, 756 bp, Artificial Sequence
  Engineered Variant of Kred from Lactobacillus kefir
atgaccgaccgtctgaagcacaaagtagccatcattaccggcgggacaatgggtatcggtttggcaatcgccgataaatttgtagaggagggtgcgaaagtagttattactggtcgtcacgcggatgtaggtgaaaaagccgccaaatcaatcggtggcagtgatgttattcgctttgtccagcacgatgcgtcggaagaagcaggctggacgacgctgttcgacaccaccgaggaggcattcggcccggttacgaccctggtgaacaatgcagggattggggttattaaaagcgttgaacggactaccacggaggaatggcgtaaagttctgtccgttaatctggatggtgtttttttcggcacccgtctgggcattcagcgcatgaaaaataaaggcttgggcgctagcatcatcaatatgagcagtattatggggctcgtaggcgatccgatgctgggggcatacaacgcttccaagggggcggtacgtatcatgtcgaaaagcgcagcgctggattgcgcactgaaggactacgatgtgcgtgtcaacacagtacatccgggcgcgatcaagaccgaacggaaggatcagctggaaggttgggaggagatgatgtcacagcgtacgctgacccctatgggccacattggcgaaccgaatgacatcgcatggatctgtgtgtacctggcgtctgacgaatcgaaatttgcgacgggtgcagaatttgtggtcgacggcgggtacaccgcacag

SEQ ID NO: 272 - protein, 252 aa, Artificial Sequence
  Engineered Variant of Kred from Lactobacillus kefir
MTDRLKHKVAIITGGTMGIGLAIADKFVEEGAKVVITGRHADVGEKAAKSIGGSDVIRFVQHDASEEAGWTTLFDTTEEAFGPVTTLVNNAGIGVIKSVERTTTEEWRKVLSVNLDGVFFGTRLGIQRMKNKGLGASIINMSSIMGLVGDPMLGAYNASKGAVRIMSKSAALDCALKDYDVRVNTVHPGAIKTERKDQLEGWEEMMSQRTLTPMGHIGEPNDIAWICVYLASDESKFATGAEFVVDGGYTAQ

SEQ ID NO: 273 - DNA, 756 bp, Artificial Sequence
  Engineered Variant of Kred from Lactobacillus kefir
atgaccgaccgtctgaagcacaaagtagccatcgttaccggcgggacaatgggtatcggtttggcaatcgccgataaatttgtagaggagggtgcgaaagtagttattactggtcgtcacgcggatgtaggtgaaaaagccgccaaatcaatcggcggcactgatgttattcgctttgtccagcacgatgcgtccgaagaagcaggctggacgaaactgttcgacaccaccgaggaggcattcggcccggttacgaccctggtgaacaatgcagggattggggttattaaaagcgttgaacggactaccacggaggaatggcgtaaagttctgtccgttaatctggatggtgtttttttcggcacccgtctgggcattcagcgcatgaaaaataaaggcttgggcgctagcatcatcaatatgagcagtattatggggctcgtaggcgatccgacgctgggggcatacaacgcttccaagggggcggtacgtatcatgtcgaaaagcgcagcgctggattgcgcactgaaggacatggatgtgcgtgtcaacacagtacatccgggcgcgatcaagaccgaacggaaggatcagctggaaggttgggaggaaatgatgtcacagcgtacgctgacccctatgggccacattggcgaaccgaatgacatcgcatggatctgtgtgtacctggcgtctgacgaatcgaaatttgcgacgggtgcagaatttgtggtcgacggcgggtacaccgcacag

SEQ ID NO: 274 - protein, 252 aa, Artificial Sequence
  Engineered Variant of Kred from Lactobacillus kefir
MTDRLKHKVAIVTGGTMGIGLAIADKFVEEGAKVVITGRHADVGEKAAKSIGGTDVIRFVQHDASEEAGWTKLFDTTEEAFGPVTTLVNNAGIGVIKSVERTTTEEWRKVLSVNLDGVFFGTRLGIQRMKNKGLGASIINMSSIMGLVGDPTLGAYNASKGAVRIMSKSAALDCALKDMDVRVNTVHPGAIKTERKDQLEGWEEMMSQRTLTPMGHIGEPNDIAWICVYLASDESKFATGAEFVVDGGYTAQ

SEQ ID NO: 275 - DNA, 756 bp, Artificial Sequence
  Engineered Variant of Kred from Lactobacillus kefir
atgaccgaccgtctgaagcagaaagtagccatcattaccggcgggacaatgggtatcggtttggcaatcgccgataaatttgtagaggagggtgcgaaagtagttattactggtcgtcacgcggatgtaggtgaaaaagccgccaaatcaatcggtggcagtgatgttattcgctttgtccagcacgatgcgtccgaagaagcaggctggacgaaactgttcgacaccaccgaggaggcattcggcccggttacgaccctggtgaacaatgcagggattggggttattaaaagcgttgaacggactaccacggaggaatggcgtaaagttctgtccgttaatctggatggtgtttttttcggcacccgtctgggcattcagcgcatgaaaaataaaggcttgggcgctagcatcatcaatatgagcagtattatggggctggtaggcgatccgacgctgggggcatacaacgcttccaagggggcggtacgtatcatgtcgaaaagcgcagcgctggattgcgcactgaaggactacgatgtgcgtgtcaacacagtacatccgggcgcgatcaagaccgaacggaaggatcagctggaaggttgggaggaaatgatgtcacagcgtacgctgacccctatgggccacattggcgaaccgaatgacatcgcatggatctgtgtgtacctggcgtctgacgaatcgaaatttgcgacgggtgcagaatttgtggtcgacggcgggtacaccgcacag

SEQ ID NO: 276 - protein, 252 aa, Artificial Sequence
  Engineered Variant of Kred from Lactobacillus kefir
MTDRLKQKVAIITGGTMGIGLAIADKFVEEGAKVVITGRHADVGEKAAKSIGGSDVIRFVQHDASEEAGWTKLFDTTEEAFGPVTTLVNNAGIGVIKSVERTTTEEWRKVLSVNLDGVFFGTRLGIQRMKNKGLGASIINMSSIMGLVGDPTLGAYNASKGAVRIMSKSAALDCALKDYDVRVNTVHPGAIKTERKDQLEGWEEMMSQRTLTPMGHIGEPNDIAWICVYLASDESKFATGAEFVVDGGYTAQ

SEQ ID NO: 277 - DNA, 756 bp, Artificial Sequence
  Engineered Variant of Kred from Lactobacillus kefir
atgaccgatcgtctgaagcacaaagtagccatcgttaccggcgggacaatgggtatcggtttggcaatcgccgataaatttgtagaggagggtgcgaaagtagttattactggtcgtcacgcggatgtaggtgaaaaagccgccaaatcaatcggtggcactgatgttattcgctttgtccagcacgatgcgtcggaagaagcaggctggacgtcgctgttcgacaccaccgaggaggcattcggcccggttacgaccctggtgaacaatgcagggattggggttattaaaagcgttgaacggactaccacggaggaatggcgtaaagttctgtccgttaatctggatggtgtttttttcggcacccgtctgggcattcagcgcatgaaaaataaaggcttgggcgctagcatcatcaatatgagcagtattatggggatggtaggcgatccgatgctgggggcatacaacgcttccaagggggcggtacgtatcatgtcgaaaagcgcagcgctggattgcgcactgaaggactacgatgtgcgtgtcaacacagtacatccgggcgcgatcaagaccgaacggaaggatcagctggaaggttgggaggagatgatgtcacagcgtacgctgacccctatgggccacattggcgaaccgaatgacatcgcatggatctgtgtgtacctggcgtctgacgaatcgaaatttgcgacgggtgcagaatttgtggtcgacggcgggtacaccgcacag

SEQ ID NO: 278 - protein, 252 aa, Artificial Sequence
  Engineered Variant of Kred from Lactobacillus kefir
MTDRLKHKVAIVTGGTMGIGLAIADKFVEEGAKVVITGRHADVGEKAAKSIGGTDVIRFVQHDASEEAGWTSLFDTTEEAFGPVTTLVNNAGIGVIKSVERTTTEEWRKVLSVNLDGVFFGTRLGIQRMKNKGLGASIINMSSIMGMVGDPMLGAYNASKGAVRIMSKSAALDCALKDYDVRVNTVHPGAIKTERKDQLEGWEEMMSQRTLTPMGHIGEPNDIAWICVYLASDESKFATGAEFVVDGGYTAQ

SEQ ID NO: 279 - DNA, 756 bp, Artificial Sequence
  Engineered Variant of Kred from Lactobacillus kefir
atgaccgatcgtctgaagcataaagtagccatcgttaccggcgggacaatgggtatcggtttggcaatcgccgataaatttgtagaggagggtgcgaaagtagttattactggtcgtgaggcggatgtaggtgaaaaagccgccaaatcaatcggcggcactgatgttattcgctttgtccagcacgatgcgtccgaagaagcaggctggacgaaactgttcgacaccaccgaggaggcattcggcccggttacgaccctggtgaacaatgcagggattggggttattaaaagcgttgaacggactaccacggaggaatggcgtaaagttctgtccgttaatctggatggtgtttttttcggcacccgtctgggcattcagcgcatgaaaaataaaggcttgggcgctagcatcatcaatatgagcagtattatggggctcgtaggcgatccgactctgggggcatacaacgcttccaagggggcggtacgtatcatgtcgaaaagcgcagcgctggattgcgcactgaaggacatggatgtgcgtgtcaacacagtacatccgggcgcgatcaagaccgaacggaaggatcagctggaaggttgggaggaaatgatgtcacagcgtacgctgacccctatgggccacattggcgaaccgaatgacatcgcatggatctgtgtgtacctggcgtctgacgaatcgaaatttgcgacgggtgcagaatttgtggtcgacggcgggtggaccgcacag

SEQ ID NO: 280 - protein, 252 aa, Artificial Sequence
  Engineered Variant of Kred from Lactobacillus kefir
MTDRLKHKVAIVTGGTMGIGLAIADKFVEEGAKVVITGREADVGEKAAKSIGGTDVIRFVQHDASEEAGWTKLFDTTEEAFGPVTTLVNNAGIGVIKSVERTTTEEWRKVLSVNLDGVFFGTRLGIQRMKNKGLGASIINMSSIMGLVGDPTLGAYNASKGAVRIMSKSAALDCALKDMDVRVNTVHPGAIKTERKDQLEGWEEMMSQRTLTPMGHIGEPNDIAWICVYLASDESKFATGAEFVVDGGWTAQ

SEQ ID NO: 281 - DNA, 756 bp, Artificial Sequence
  Engineered Variant of Kred from Lactobacillus kefir
atgaccgaccgtctgaagcacaaagtagccatcgttaccggcgggacaatgggtatcggtttggcaatcgccgataaatttgtagaggagggtgcgaaagtagttattactggtcgtcacgcggatgtaggtgaaaaagccgccaaatcaatcggtggcagtgatgttattcgctttgtccagcacgatgcgtcggaagaagcaggctggacgtcgctgttcgacaccaccgaggaggcattcggcccggttacgaccctggtgaacaatgcagggattggggttattaaaagcgttgaacggactacgacggaggaatggcgtaaagttctgtccgttaatctggatggtgtttttttcggcacccgtctgggcattcagcgcatgaaaaataaaggcttgggcgctagcatcatcaatatgagcagtattatggggctggtaggcgatccgactctgggggcatacaacgcttccaagggggcggtacgtatcatgtcgaaaagcgcagcgctggattgcgcactgaaggacatggatgtgcgtgtcaacacagtacatccgggcgcgatcaagaccgaacggaaggatcagctggaaggttgggaggagatgatgtcacagcgtacgctgacccctatgggccacattggcgaaccgaatgacatcgcatggatctgtgtgtacctggcgtctgacgaatcgaaatttgcgacgggtgcagaatttgtggtcgacggcgggtggaccgcacag

SEQ ID NO: 282 - protein, 252 aa, Artificial Sequence
  Engineered Variant of Kred from Lactobacillus kefir
MTDRLKHKVAIVTGGTMGIGLAIADKFVEEGAKVVITGRHADVGEKAAKSIGGSDVIRFVQHDASEEAGWTSLFDTTEEAFGPVTTLVNNAGIGVIKSVERTTTEEWRKVLSVNLDGVFFGTRLGIQRMKNKGLGASIINMSSIMGLVGDPTLGAYNASKGAVRIMSKSAALDCALKDMDVRVNTVHPGAIKTERKDQLEGWEEMMSQRTLTPMGHIGEPNDIAWICVYLASDESKFATGAEFVVDGGWTAQ

SEQ ID NO: 283 - DNA, 756 bp, Artificial Sequence
  Engineered Variant of Kred from Lactobacillus kefir
atgaccgaccgtctgaagcagaaagtagccatcgttaccggcgggacaatgggtatcggtttggcaatcgccgataaatttgtagaggagggtgcgaaagtagttattactggtcgtcacgcggatgtaggtgaaaaagccgccaaatcaatcggcggcactgatgttattcgctttgtccagcacgatgcgtccgaagaagcaggctggacgaaactgttcgacaccaccgaggaggcattcggcccggttacgaccctggtgaacaatgcagggattggggttattaaaagcgttgaacggactaccacggaggaatggcgtaaagttctgtccgttaatctggatggtgtttttttcggcacccgtctgggcattcagcgcatgaaaaataaaggcttgggcgctagcatcatcaatatgagcagtattatggggctggtaggcgatccgatgctgggggcatacaacgcttccaagggggcggtacgtatcatgtcgaaaagcgcagcgctggattgcgcactgaaggacatggatgtgcgtgtcaacacagtacatccgggcgcgatcaagaccgaacggaaggatcagctggaaggttgggaggaaatgatgtcacagcgtacgctgacccctatgggccacattggcgaaccgaatgacatcgcatggatctgtgtgtacctggcgtctgacgaatcgaaatttgcgacgggtgcagaatttgtggtcgacggcgggtggaccgcacag

SEQ ID NO: 284 - protein, 252 aa, Artificial Sequence
  Engineered Variant of Kred from Lactobacillus kefir
MTDRLKQKVAIVTGGTMGIGLAIADKFVEEGAKVVITGRHADVGEKAAKSIGGTDVIRFVQHDASEEAGWTKLFDTTEEAFGPVTTLVNNAGIGVIKSVERTTTEEWRKVLSVNLDGVFFGTRLGIQRMKNKGLGASIINMSSIMGLVGDPMLGAYNASKGAVRIMSKSAALDCALKDMDVRVNTVHPGAIKTERKDQLEGWEEMMSQRTLTPMGHIGEPNDIAWICVYLASDESKFATGAEFVVDGGWTAQ

SEQ ID NO: 285 - DNA, 756 bp, Artificial Sequence
  Engineered Variant of Kred from Lactobacillus kefir
atgaccgatcgtctgaagcacaaagtagccatcgtcaccggcgggacaatgggtatcggtttggcaatcgccgataaatttgtagaggagggtgcgaaagtagttattactggtcgtcacgcggatgtaggtctgaaagccgccaaatcaatcggtggcagtgatgttattcgctttgtccagcacgatgcgtccgaagaagcaggctggacgagtctgttcgacaccaccgaggaggcattcggcccggttacgaccctggtgaacaatgcagggattggggtaattaagagcgttgaacggactaccacggaggaatggcgtaaagttctgtccgttaatctggatggtgtttttttcggcacccgtctgggcattcagcgcatgaaaaataaaggcttgggcgctagcatcatcaatatgagcagtattatggggctggtaggctatccggcggccggggcatacaacgcttccaagggggcggtacgtatcatgtcgaaaagcgcagcgctggattgcgcactgaaggactacgatgtgcgtgtcaacacagtacatccgggcgcgatcaagaccgagcggaaggatcagctggaaggttgggagcaggcaatgtcacagcgtacggcgacccctatgggccacattggcgaaccgaatgacatcgcatggatctgtgtgtacctggcatctgacgaatcgaaatttgcgacgggtgcagaatttgtggtcgacggcgggtggaccgcacag

SEQ ID NO: 286 - protein, 252 aa, Artificial Sequence
  Engineered Variant of Kred from Lactobacillus kefir
MTDRLKHKVAIVTGGTMGIGLAIADKFVEEGAKVVITGRHADVGLKAAKSIGGSDVIRFVQHDASEEAGWTSLFDTTEEAFGPVTTLVNNAGIGVIKSVERTTTEEWRKVLSVNLDGVFFGTRLGIQRMKNKGLGASIINMSSIMGLVGYPAAGAYNASKGAVRIMSKSAALDCALKDYDVRVNTVHPGAIKTERKDQLEGWEQAMSQRTATPMGHIGEPNDIAWICVYLASDESKFATGAEFVVDGGWTAQ

SEQ ID NO: 287 - DNA, 756 bp, Artificial Sequence
  Engineered Variant of Kred from Lactobacillus kefir
atgaccgatcgtctgaagcacaaagtagccatcgtcaccggcgggacaatgggtatcggtttggcaatcgccgataaatttgtagaggagggtgcgaaagtagttattactggtcgtcacgcggatgtaggtctgaaagccgccaaatcaatcggtggcagtgatgttattcgctttgtccagcacgatgcgtccgaagaagcaggctggacgagtctgttcgacaccaccgaggaggcattcggcccggttacgaccctggtgaacaatgcagggattggggtaattaaaagcgttgaacggactaccacggaggaatggcgtaaagttctgtccgttaatctggatggtgtttttttcggcacccgtctgggcattcagcgcatgaaaaataaaggcttgggcgctagcatcatcaatatgagcagtattatggggctggtaggctatccgtcggccggggcatacaacgcttccaagggggcggtacgtatcatgtcgaaaagcgcagcgctggattgcgcactgaaggactacgatgtgcgtgtcaacacagtacatccgggcgcgatcaagaccgagcggaaggatcagctggaaggttgggagcaggcaatgtcacagcgtacggcgacccctatgggccacattggcgaaccgaatgacatcgcatggatctgtgtgtacctggcatctgacgaatcgaaatttgcgacgggtgcagaatttgtggtcgacggcgggtggaccgcacag

SEQ ID NO: 288 - protein, 252 aa, Artificial Sequence
  Engineered Variant of Kred from Lactobacillus kefir
MTDRLKHKVAIVTGGTMGIGLAIADKFVEEGAKVVITGRHADVGLKAAKSIGGSDVIRFVQHDASEEAGWTSLFDTTEEAFGPVTTLVNNAGIGVIKSVERTTTEEWRKVLSVNLDGVFFGTRLGIQRMKNKGLGASIINMSSIMGLVGYPSAGAYNASKGAVRIMSKSAALDCALKDYDVRVNTVHPGAIKTERKDQLEGWEQAMSQRTATPMGHIGEPNDIAWICVYLASDESKFATGAEFVVDGGWTAQ

SEQ ID NO: 289 - DNA, 756 bp, Artificial Sequence
  Engineered Variant of Kred from Lactobacillus kefir
atgaccgatcgtctgaagcacaaagtagccatcgtcaccggcgggacaatgggtatcggtttggcaatcgccgataaatttgtagaggagggtgcgaaagtagttattactggtcgtcacgcggatgtaggtctgaaagccgccaaatcaatcggtggcagtgatgttattcgctttgtccagcacgatgcgtccgaagaagcaggctggacgagtctgttcgacaccaccgaggaggcattcggcccggttacgaccctggtgaacaatgcagggattggggtaattaagagcgttgaacggactaccacggaggaatggcgtaaagttctgtccgttaatctggatggtgtttttttcggcacccgtctgggcattcagcgcatgaaaaataaaggcttgggcgctagcatcatcaatatgagcagtattatggggctggtaggcgctccgatggcaggggcatacaacgcttccaagggggcggtacgtatcatgtcgaaaagcgcagcgctggattgcgcactgaaggactacgatgtgcgtgtcaacacagtacatccgggcgcgatcaagacctcggctaaagatcagctggaaggttgggagcaggcaatgtcacagcgtacggcgacccctatgggccacattggcgaaccgaatgacatcgcatggatctgtgtgtacctggcatctgacgaatcgaaatttgcgacgggtgcagaatttgtggtcgacggcgggtggaccgcacag

SEQ ID NO: 290 - protein, 252 aa, Artificial Sequence
  Engineered Variant of Kred from Lactobacillus kefir
MTDRLKHKVAIVTGGTMGIGLAIADKFVEEGAKVVITGRHADVGLKAAKSIGGSDVIRFVQHDASEEAGWTSLFDTTEEAFGPVTTLVNNAGIGVIKSVERTTTEEWRKVLSVNLDGVFFGTRLGIQRMKNKGLGASIINMSSIMGLVGAPMAGAYNASKGAVRIMSKSAALDCALKDYDVRVNTVHPGAIKTSAKDQLEGWEQAMSQRTATPMGHIGEPNDIAWICVYLASDESKFATGAEFVVDGGWTAQ

SEQ ID NO: 291 - DNA, 756 bp, Artificial Sequence
  Engineered Variant of Kred from Lactobacillus kefir
atgaccgatcgtctgaagcacaaagtagccatcgtcaccggcgggacaatgggtatcggtttggcaatcgccgataaatttgtagaggagggtgcgaaagtagttattactggtcgtcacgcggatgtaggtctgaaagccgccaaatcaatcggtggcagtgatgttattcgctttgtccagcacgatgcgtccgaagaagcaggctggacgagtctgttcgacaccaccgaggaggcattcggcccggttacgaccctggtgaacaatgcagccgagggcgtcattaagagcgttgaacggactaccacggaggaatggcgtaaagttctgtccgttaatctggatggtgtttttttcggcacccgtctgggcattcagcgcatgaaaaataaaggcttgggcgctagcatcatcaatatgagcagtattatggggctggtaggcgctccgatggcaggggcatacaacgcttccaagggggcggtacgtatcatgtcgaaaagcgcagcgctggattgcgcactgaaggactacgatgtgcgtgtcaacacagtacatccgggcgcgatcaagaccgagcggaaggatcagctggaaggttgggagcaggcaatgtcacagcgtacggcgacccctatgggccacattggcgaaccgaatgacatcgcatggatctgtgtgtacctggcatctgacgaatcgaaatttgcgacgggtgcagaatttgtggtcgacggcgggtggaccgcacag

SEQ ID NO: 292 - protein, 252 aa, Artificial Sequence
  Engineered Variant of Kred from Lactobacillus kefir
MTDRLKHKVAIVTGGTMGIGLAIADKFVEEGAKVVITGRHADVGLKAAKSIGGSDVIRFVQHDASEEAGWTSLFDTTEEAFGPVTTLVNNAAEGVIKSVERTTTEEWRKVLSVNLDGVFFGTRLGIQRMKNKGLGASIINMSSIMGLVGAPMAGAYNASKGAVRIMSKSAALDCALKDYDVRVNTVHPGAIKTERKDQLEGWEQAMSQRTATPMGHIGEPNDIAWICVYLASDESKFATGAEFVVDGGWTAQ

SEQ ID NO: 293 - DNA, 756 bp, Artificial Sequence
  Engineered Variant of Kred from Lactobacillus kefir
atgaccgatcgtctgaagcacaaagtagccatcgtcaccggcgggacaatgggtatcggtttggcaatcgccgataaatttgtagaggagggtgcgaaagtagttattactggtcgtcacgcggatgtaggtctgaaagccgccaaatcaatcggtggcagtgatgttattcgctttgtccagcacgatgcgtccgaagaagcaggctggacgagtctgttcgacaccaccgaggaggcattcggcccggttacgaccctggtgaacaatgcagggattggggtaattaaaagcgttgaacggactaccacggaggaatggcgtaaagttctgtccgttaatctggatggtgtttttttcggcacccgtctgggcattcagcgcatgaaaaataaaggcttgggcgctagcatcatcaatatgagcagtattatggggctggtaggcgatccggcgctgggggcatacaacgcttccaagggggcggtacgtatcatgtcgaaaagcgcagcgctggattgcgcactgaaggactacgatgtgcgtgtcaacacagtacatccgggcgcgatcaagaccgagcggaaggatcagctggaaggttgggagcaggcaatgtcacagcgtacggcgacccctatgggccacattggcgaaccgaatgacatcgcatggatctgtgtgtacctggcatctgacgaatcgaaatttgcgacgggtgcagaatttgtggtcgacggcgggtggaccgcacag

SEQ ID NO: 294 - protein, 252 aa, Artificial Sequence
  Engineered Variant of Kred from Lactobacillus kefir
MTDRLKHKVAIVTGGTMGIGLAIADKFVEEGAKVVITGRHADVGLKAAKSIGGSDVIRFVQHDASEEAGWTSLFDTTEEAFGPVTTLVNNAGIGVIKSVERTTTEEWRKVLSVNLDGVFFGTRLGIQRMKNKGLGASIINMSSIMGLVGDPALGAYNASKGAVRIMSKSAALDCALKDYDVRVNTVHPGAIKTERKDQLEGWEQAMSQRTATPMGHIGEPNDIAWICVYLASDESKFATGAEFVVDGGWTAQ

SEQ ID NO: 295 - DNA, 756 bp, Artificial Sequence
  Engineered Variant of Kred from Lactobacillus kefir
atgaccgaccgtctgaagcacaaagtagccatcattaccggcgggacaatgggtatcggtttggcaatcgccgataaatttgtagaggagggtgcgaaagtagttattactggtcgtcacgcggatgtaggtgaaaaagccgccaaatcaatcggtggcagtgatgttattcgctttgtccagcacgatgcgtcggaagaagcaggctggacgacgctgttcgacaccaccgaggaggcattcggcccggttacgaccctggtgaacaatgcaggtgatggccgtattaaaagcgttgaacggactaccacggaggaatggcgtaaagttctgtccgttaatctggatggtgtttttttcggcacccgtctgggcattcagcgcatgaaaaataaaggcttgggcgctagcatcatcaatatgagcagtattatggggctcgtaggcgatccgatgctgggggcatacaacgcttccaagggggcggtacgtatcatgtcgaaaagcgcagcgctggattgcgcactgaaggactacgatgtgcgtgtcaacacagtacatccgggcgcgatcaagaccgaacggaaggatcagctggaaggttgggaggagatgatgtcacagcgtacgctgacccctatgggccacattggcgaaccgaatgacatcgcatggatctgtgtgtacctggcgtctgacgaatcgaaatttgcgacgggtgcagaatttgtggtcgacggcgggtacaccgcacag

SEQ ID NO: 296 - protein, 252 aa, Artificial Sequence
  Engineered Variant of Kred from Lactobacillus kefir
MTDRLKHKVAIITGGTMGIGLAIADKFVEEGAKVVITGRHADVGEKAAKSIGGSDVIRFVQHDASEEAGWTTLFDTTEEAFGPVTTLVNNAGDGRIKSVERTTTEEWRKVLSVNLDGVFFGTRLGIQRMKNKGLGASIINMSSIMGLVGDPMLGAYNASKGAVRIMSKSAALDCALKDYDVRVNTVHPGAIKTERKDQLEGWEEMMSQRTLTPMGHIGEPNDIAWICVYLASDESKFATGAEFVVDGGYTAQ

SEQ ID NO: 297 - DNA, 756 bp, Artificial Sequence
  Engineered Variant of Kred from Lactobacillus kefir
atgaccgaccgtctgaagcacaaagtagccatcattaccggcgggacaatgggtatcggtttggcaatcgccgataaatttgtagaggagggtgcgaaagtagttattactggtcgtcacgcggatgtaggtgaaaaagccgccaaatcaatcggtggcagtgatgttattcgctttgtccagcacgatgcgtcggaagaagcaggctggacgacgctgttcgacaccaccgaggaggcattcggcccggttacgaccctggtgaacaatgcaggtgctggcaaaattaaaagcgttgaacggactaccacggaggaatggcgtcgtgttctgtccgtgaatctggatggtgtttttttcggcacccgtctgggcattcagcgcatgaaaaataaaggcttgggcgctagcatcatcaatatgagcagtattatggggctcgtaggcgatccgatgctgggggcatacaacgcttccaagggggcggtacgtatcatgtcgaaaagcgcagcgctggattgcgcactgaaggactacgatgtgcgtgtcaacacagtacatccgggcgcgatcaagaccgaacggaaggatcagctggaaggttgggaggagatgatgtcacagcgtacgctgacccctatgggccacattggcgaaccgaatgacatcgcatggatctgtgtgtacctggcgtctgacgaatcgaaatttgcgacgggtgcagaatttgtggtcgacggcgggtacaccgcacag

SEQ ID NO: 298 - protein, 252 aa, Artificial Sequence
  Engineered Variant of Kred from Lactobacillus kefir
MTDRLKHKVAIITGGTMGIGLAIADKFVEEGAKVVITGRHADVGEKAAKSIGGSDVIRFVQHDASEEAGWTTLFDTTEEAFGPVTTLVNNAGAGKIKSVERTTTEEWRRVLSVNLDGVFFGTRLGIQRMKNKGLGASIINMSSIMGLVGDPMLGAYNASKGAVRIMSKSAALDCALKDYDVRVNTVHPGAIKTERKDQLEGWEEMMSQRTLTPMGHIGEPNDIAWICVYLASDESKFATGAEFVVDGGYTAQ

SEQ ID NO: 299 - DNA, 756 bp, Artificial Sequence
  Engineered Variant of Kred from Lactobacillus kefir
atgaccgaccgtctgaagcacaaagtagccatcattaccggcgggacaatgggtatcggtttggcaatcgccgataaatttgtagaggagggtgcgaaagtagttattactggtcgtcacgcggatgtaggtgaaaaagccgccaaatcaatcggtggcagtgatgttattcgctttgtccagcacgatgcgtcggaagaagcaggctggacgacgctgttcgacaccaccgaggaggcattcggcccggttacgaccctggtgaacaatgcaggtgctggccgtattaaaagcgttgaacggactaccacggaggaatggcgtgatgttctgtccgtgacgctggatggtgtttttttcggcacccgtctgggcattcagcgcatgaaaaataaaggcttgggcgctagcatcatcaatatgagcagtattatggggctcgtaggcgatccgatgctgggggcatacaacgcttccaagggggcggtacgtatcatgtcgaaaagcgcagcgctggattgcgcactgaaggactacgatgtgcgtgtcaacacagtacatccgggcgcgatcaagaccgaacggaaggatcagctggaaggttgggaggagatgatgtcacagcgtacgctgacccctatgggccacattggcgaaccgaatgacatcgcatggatctgtgtgtacctggcgtctgacgaatcgaaatttgcgacgggtgcagaatttgtggtcgacggcgggtacaccgcacag

SEQ ID NO: 300 - protein, 252 aa, Artificial Sequence
  Engineered Variant of Kred from Lactobacillus kefir
MTDRLKHKVAIITGGTMGIGLAIADKFVEEGAKVVITGRHADVGEKAAKSIGGSDVIRFVQHDASEEAGWTTLFDTTEEAFGPVTTLVNNAGAGRIKSVERTTTEEWRDVLSVTLDGVFFGTRLGIQRMKNKGLGASIINMSSIMGLVGDPMLGAYNASKGAVRIMSKSAALDCALKDYDVRVNTVHPGAIKTERKDQLEGWEEMMSQRTLTPMGHIGEPNDIAWICVYLASDESKFATGAEFVVDGGYTAQ

SEQ ID NO: 301 - DNA, 756 bp, Artificial Sequence
  Engineered Variant of Kred from Lactobacillus kefir
atgaccgaccgtctgaagcacaaagtagccatcattaccggcgggacaatgggtatcggtttggcaatcgccgataaatttgtagaggagggtgcgaaagtagttattactggtcgtcacgcggatgtaggtgaaaaagccgccaaatcaatcggtggcagtgatgttattcgctttgtccagcacgatgcgtcggaagaagcaggctggacgacgctgttcgacaccaccgaggaggcattcggcccggttacgaccctggtgaacaatgcaggtcgtggcgccattaaaagcgttgaacggactaccacggaggaatggcgtaaagttctgtccgtgacgctggatggtgtttttttcggcacccgtctgggcattcagcgcatgaaaaataaaggcttgggcgctagcatcatcaatatgagcagtattatggggctcgtaggcgatccgatgctgggggcatacaacgcttccaagggggcggtacgtatcatgtcgaaaagcgcagcgctggattgcgcactgaaggactacgatgtgcgtgtcaacacagtacatccgggcgcgatcaagaccgaacggaaggatcagctggaaggttgggaggagatgatgtcacagcgtacgctgacccctatgggccacattggcgaaccgaatgacatcgcatggatctgtgtgtacctggcgtctgacgaatcgaaatttgcgacgggtgcagaatttgtggtcgacggcgggtacaccgcacag

SEQ ID NO: 302 - protein, 252 aa, Artificial Sequence
  Engineered Variant of Kred from Lactobacillus kefir
MTDRLKHKVAIITGGTMGIGLAIADKFVEEGAKVVITGRHADVGEKAAKSIGGSDVIRFVQHDASEEAGWTTLFDTTEEAFGPVTTLVNNAGRGAIKSVERTTTEEWRKVLSVTLDGVFFGTRLGIQRMKNKGLGASIINMSSIMGLVGDPMLGAYNASKGAVRIMSKSAALDCALKDYDVRVNTVHPGAIKTERKDQLEGWEEMMSQRTLTPMGHIGEPNDIAWICVYLASDESKFATGAEFVVDGGYTAQ

SEQ ID NO: 303 - DNA, 756 bp, Artificial Sequence
  Engineered Variant of Kred from Lactobacillus kefir
atgaccgaccgtctgaagcacaaagtagccatcattaccggcgggacaatgggtatcggtttggcaatcgccgataaatttgtagaggagggtgcgaaagtagttattactggtcgtcacgcggatgtaggtgaaaaagccgccaaatcaatcggtggcagtgatgttattcgctttgtccagcacgatgcgtcggaagaagcaggctggacgacgctgttcgacaccaccgaggaggcattcggcccggttacgaccctggtgaacaatgcagggatgggggttattaaaagcgttgaacggactaccacggaggaatggcgtaaagttctgtccgttaatctggatggtgtttttttcggcacccgtctgggcattcagcgcatgaaaaataaaggcttgggcgctagcatcatcaatatgagcagtattatggggctcgtaggcgatccgatgctgggggcatacaacgcttccaagggggcggtacgtatcatgtcgaaaagcgcagcgctggattgcgcactgaaggactacgatgtgcgtgtcaacacagtacatccgggcgcgatcaagaccgaacggaaggatcagctggaaggttgggaggagatgatgtcacagcgtacgctgacccctatgggccacattggcgaaccgaatgacatcgcatggatctgtgtgtacctggcgtctgacgaatcgaaatttgcgacgggtgcagaatttgtggtcgacggcgggtacaccgcacag

SEQ ID NO: 304 - protein, 252 aa, Artificial Sequence
  Engineered Variant of Kred from Lactobacillus kefir
MTDRLKHKVAIITGGTMGIGLAIADKFVEEGAKVVITGRHADVGEKAAKSIGGSDVIRFVQHDASEEAGWTTLFDTTEEAFGPVTTLVNNAGMGVIKSVERTTTEEWRKVLSVNLDGVFFGTRLGIQRMKNKGLGASIINMSSIMGLVGDPMLGAYNASKGAVRIMSKSAALDCALKDYDVRVNTVHPGAIKTERKDQLEGWEEMMSQRTLTPMGHIGEPNDIAWICVYLASDESKFATGAEFVVDGGYTAQ

SEQ ID NO: 305 - DNA, 756 bp, Artificial Sequence
  Engineered Variant of Kred from Lactobacillus kefir
atgaccgaccgtctgaagcacaaagtagccatcattaccggcgggacaatgggtatcggtttggcaatcgccgataaatttgtagaggagggtgcgaaagtagttattactggtcgtcacgcggatgtaggtgaaaaagccgccaaatcaatcggtggcagtgatgttattcgctttgtccagcacgatgcgtcggaagaagcaggctggacgacgctgttcgacaccaccgaggaggcattcggcccggttacgaccctggtgaacaatgcaggtgagggcgtcattaaaagcgttgaacggactaccacggaggaatggcgtcgtgttctgtccgtggcgctggatggtgtttttttcggcacccgtctgggcattcagcgcatgaaaaataaaggcttgggcgctagcatcatcaatatgagcagtattatggggctcgtaggcgatccgatgctgggggcatacaacgcttccaagggggcggtacgtatcatgtcgaaaagcgcagcgctggattgcgcactgaaggactacgatgtgcgtgtcaacacagtacatccgggcgcgatcaagaccgaacggaaggatcagctggaaggttgggaggagatgatgtcacagcgtacgctgacccctatgggccacattggcgaaccgaatgacatcgcatggatctgtgtgtacctggcgtctgacgaatcgaaatttgcgacgggtgcagaatttgtggtcgacggcgggtacaccgcacag

SEQ ID NO: 306 - protein, 252 aa, Artificial Sequence
  Engineered Variant of Kred from Lactobacillus kefir
MTDRLKHKVAIITGGTMGIGLAIADKFVEEGAKVVITGRHADVGEKAAKSIGGSDVIRFVQHDASEEAGWTTLFDTTEEAFGPVTTLVNNAGEGVIKSVERTTTEEWRRVLSVALDGVFFGTRLGIQRMKNKGLGASIINMSSIMGLVGDPMLGAYNASKGAVRIMSKSAALDCALKDYDVRVNTVHPGAIKTERKDQLEGWEEMMSQRTLTPMGHIGEPNDIAWICVYLASDESKFATGAEFVVDGGYTAQ

SEQ ID NO: 307 - DNA, 756 bp, Artificial Sequence
  Engineered Variant of Kred from Lactobacillus kefir
atgaccgaccgtctgaagcacaaagtagccatcattaccggcgggacaatgggtatcggtttggcaatcgccgataaatttgtagaggagggtgcgaaagtagttattactggtcgtcacgcggatgtaggtgaaaaagccgccaaatcaatcggtggcagtgatgttattcgctttgtccagcacgatgcgtcggaagaagcaggctggacgacgctgttcgacaccaccgaggaggcattcggcccggttacgaccctggtgaacaatgcagggattggggttattaaaagcgttgaacggactaccacggaggaatggcgtaaagttctgtccgtggcgctggatggtgtttttttcggcacccgtctgggcattcagcgcatgaaaaataaaggcttgggcgctagcatcatcaatatgagcagtattatggggctcgtaggcgatccgatgctgggggcatacaacgcttccaagggggcggtacgtatcatgtcgaaaagcgcagcgctggattgcgcactgaaggactacgatgtgcgtgtcaacacagtacatccgggcgcgatcaagaccgaacggaaggatcagctggaaggttgggaggagatgatgtcacagcgtacgctgacccctatgggccacattggcgaaccgaatgacatcgcatggatctgtgtgtacctggcgtctgacgaatcgaaatttgcgacgggtgcagaatttgtggtcgacggcgggtacaccgcacag

SEQ ID NO: 308 - protein, 252 aa, Artificial Sequence
  Engineered Variant of Kred from Lactobacillus kefir
MTDRLKHKVAIITGGTMGIGLAIADKFVEEGAKVVITGRHADVGEKAAKSIGGSDVIRFVQHDASEEAGWTTLFDTTEEAFGPVTTLVNNAGIGVIKSVERTTTEEWRKVLSVALDGVFFGTRLGIQRMKNKGLGASIINMSSIMGLVGDPMLGAYNASKGAVRIMSKSAALDCALKDYDVRVNTVHPGAIKTERKDQLEGWEEMMSQRTLTPMGHIGEPNDIAWICVYLASDESKFATGAEFVVDGGYTAQ

SEQ ID NO: 309 - DNA, 756 bp, Artificial Sequence
  Engineered Variant of Kred from Lactobacillus kefir
atgaccgaccgtctgaagcacaaagtagccatcattaccggcgggacaatgggtatcggtttggcaatcgccgataaatttgtagaggagggtgcgaaagtagttattactggtcgtcacgcggatgtaggtgaaaaagccgccaaatcaatcggtggcagtgatgttattcgctttgtccagcacgatgcgtcggaagaagcaggctggacgacgctgttcgacaccaccgaggaggcattcggcccggttacgaccctggtgaacaatgcagctgatggccgtattaaaagcgttgaacggactaccacggaggaatggcgtaaagttctgtccgttaatctggatggtgtttttttcggcacccgtctgggcattcagcgcatgaaaaataaaggcttgggcgctagcatcatcaatatgagcagtattatggggctcgtaggcgatccgatgctgggggcatacaacgcttccaagggggcggtacgtatcatgtcgaaaagcgcagcgctggattgcgcactgaaggactacgatgtgcgtgtcaacacagtacatccgggcgcgatcaagaccgaacggaaggatcagctggaaggttgggaggagatgatgtcacagcgtacgctgacccctatgggccacattggcgaaccgaatgacatcgcatggatctgtgtgtacctggcgtctgacgaatcgaaatttgcgacgggtgcagaatttgtggtcgacggcgggtacaccgcacag

SEQ ID NO: 310 - protein, 252 aa, Artificial Sequence
  Engineered Variant of Kred from Lactobacillus kefir
MTDRLKHKVAIITGGTMGIGLAIADKFVEEGAKVVITGRHADVGEKAAKSIGGSDVIRFVQHDASEEAGWTTLFDTTEEAFGPVTTLVNNAADGRIKSVERTTTEEWRKVLSVNLDGVFFGTRLGIQRMKNKGLGASIINMSSIMGLVGDPMLGAYNASKGAVRIMSKSAALDCALKDYDVRVNTVHPGAIKTERKDQLEGWEEMMSQRTLTPMGHIGEPNDIAWICVYLASDESKFATGAEFVVDGGYTAQ

SEQ ID NO: 311 - DNA, 756 bp, Artificial Sequence
  Engineered Variant of Kred from Lactobacillus kefir
atgaccgatcgtctgaagcacaaagtagccatcgtcaccggcgggacaatgggtatcggtttggcaatcgccgataaatttgtagaggagggtgcgaaagtagttattactggtcgtcacgcggatgtaggtctgaaagccgccaaatcaatcggtggcagtgatgttattcgctttgtccagcacgatgcgtccgaagaagcaggctggacgagtctgttcgacaccaccgaggaggcattcggcccggttacgaccctggtgaacaatgcagggattggggtggccaagagcgttgaacggactaccacggaggaatggcgtaaagttctgtccgttaatctggatggtgtttttttcggcacccgtctgggcattcagcgcatgaaaaataaaggcttgggcgctagcatcatcaatatgagcagtattatggggctggtaggctatccggcggccggggcatacaacgcttccaagggggcggtacgtatcatgtcgaaaagcgcagcgctggattgcgcactgaaggactacgatgtgcgtgtcaacacagtacatccgggcgcgatcaagaccgagcggaaggatcagctggaaggttgggagcaggcaatgtcacagcgtacggcgacccctatgggccacattggcgaaccgaatgacatcgcatggatctgtgtgtacctggcatctgacgaatcgaaatttgcgacgggtgcagaatttgtggtcgacggcgggtggaccgcacag

SEQ ID NO: 312 - protein, 252 aa, Artificial Sequence
  Engineered Variant of Kred from Lactobacillus kefir
MTDRLKHKVAIVTGGTMGIGLAIADKFVEEGAKVVITGRHADVGLKAAKSIGGSDVIRFVQHDASEEAGWTSLFDTTEEAFGPVTTLVNNAGIGVAKSVERTTTEEWRKVLSVNLDGVFFGTRLGIQRMKNKGLGASIINMSSIMGLVGYPAAGAYNASKGAVRIMSKSAALDCALKDYDVRVNTVHPGAIKTERKDQLEGWEQAMSQRTATPMGHIGEPNDIAWICVYLASDESKFATGAEFVVDGGWTAQ

SEQ ID NO: 313 - DNA, 756 bp, Artificial Sequence
  Engineered Variant of Kred from Lactobacillus kefir
atgaccgatcgtctgaagcacaaagtagccatcgtcaccggcgggacaatgggtatcggtttggcaatcgccgataaatttgtagaggagggtgcgaaagtagttattactggtcgtcacgcggatgtaggtctgaaagccgccaaatcaatcggtggcagtgatgttattcgctttgtccagcacgatgcgtccgaagaagcaggctggacgagtctgttcgacaccaccgaggaggcattcggcccggttacgaccctggtgaacaatgcagggattggggtgatcaagagcgttgaacggactaccacggaggaatggcgtaaagttctgtccgttaatctggatggtgtttttttcggcacccgtctgggcattcagcgcatgaaaaataaaggcttgggcgctagcatcatcaatatgagctcgatcgcagggctggtaggcgccccggccgccggggcatacaacgcttccaagggggcggtacgtatcatgtcgaaaagcgcagcgctggattgcgcactgaaggactacgatgtgcgtgtcaacacagtacatccgggcgcgatcaagaccgagcggaaggatcagctggaaggttgggagcaggcaatgtcacagcgtacggcgacccctatgggccacattggcgaaccgaatgacatcgcatggatctgtgtgtacctggcatctgacgaatcgaaatttgcgacgggtgcagaatttgtggtcgacggcgggtggaccgcacag

SEQ ID NO: 314 - protein, 252 aa, Artificial Sequence
  Engineered Variant of Kred from Lactobacillus kefir
MTDRLKHKVAIVTGGTMGIGLAIADKFVEEGAKVVITGRHADVGLKAAKSIGGSDVIRFVQHDASEEAGWTSLFDTTEEAFGPVTTLVNNAGIGVIKSVERTTTEEWRKVLSVNLDGVFFGTRLGIQRMKNKGLGASIINMSSIAGLVGAPAAGAYNASKGAVRIMSKSAALDCALKDYDVRVNTVHPGAIKTERKDQLEGWEQAMSQRTATPMGHIGEPNDIAWICVYLASDESKFATGAEFVVDGGWTAQ

SEQ ID NO: 315 - DNA, 756 bp, Artificial Sequence
  Engineered Variant of Kred from Lactobacillus kefir
atgaccgatcgtctgaagcacaaagtagccatcatcaccggcgggacaatgggtatcggtttggcaatcgccgataaatttgtagaggagggtgcgaaagtagttattactggtcgtcacgcggatgtaggtgagaaagccgccaaatcaatcggtggcagtgatgttattcgctttgtccagcacgatgcgtccgaagaagcaggctggacgagcctgttcgacaccaccgaggaggcattcggcccggttacgaccctggtgaacaatgcagggattggggtaattaagagcgttgaacggactaccacggaggaatggcgtaaagttctgtccgttaatctggatggtgtttttttcggcacccgtctgggcattcagcgcatgaaaaataaaggcttgggcgctagcatcatcaatatgagcagtattatggggctggtaggctatccggccgccggggcatacaacgcttccaagggggcggtacgtatcatgtcgaaaagcgcagcgctggattgcgcactgaaggactacgatgtgcgtgtcaacacagtacatccgggcgcgatcaagaccgagcggaaggatcagctggaaggttgggagcaggcaatgtcacagcgtacggcgacccctatgggccacattggcgaaccgaatgacatcgcatggatctgtgtgtacctggcatctgacgaatcgaaatttgcgacgggtgcagaatttgtggtcgacggcgggtacaccgcacag

SEQ ID NO: 316 - protein, 252 aa, Artificial Sequence
  Engineered Variant of Kred from Lactobacillus kefir
MTDRLKHKVAIITGGTMGIGLAIADKFVEEGAKVVITGRHADVGEKAAKSIGGSDVIRFVQHDASEEAGWTSLFDTTEEAFGPVTTLVNNAGIGVIKSVERTTTEEWRKVLSVNLDGVFFGTRLGIQRMKNKGLGASIINMSSIMGLVGYPAAGAYNASKGAVRIMSKSAALDCALKDYDVRVNTVHPGAIKTERKDQLEGWEQAMSQRTATPMGHIGEPNDIAWICVYLASDESKFATGAEFVVDGGYTAQ

SEQ ID NO: 317 - DNA, 756 bp, Artificial Sequence
  Engineered Variant of Kred from Lactobacillus kefir
atgaccgatcgtctgaagcacaaagtagccatcgtcaccggcgggacaatgggtatcggtttggcaatcgccgataaatttgtagaggagggtgcgaaagtagttattactggtcgtcacgcggatgtaggtgagaaagccgccaaatcaatcggtggcagtgatgttattcgctttgtccagcacgatgcgtccgaagaagcaggctggacgagtctgttcgacaccaccgaggaggcattcggcccggttacgaccctggtgaacaatgcagggattggggtaattaagagcgttgaacggactaccacggaggaatggcgtaaagttctgtccgttaatctggatggtgtttttttcggcacccgtctgggcattcagcgcatgaaaaataaaggcttgggcgctagcatcatcaatatgagcagtattatggggctggtaggctatccggccgccggggcatacaacgcttccaagggggcggtacgtatcatgtcgaaaagcgcagcgctggattgcgcactgaaggactacgatgtgcgtgtcaacacagtacatccgggcgcgatcaagaccgagcggaaggatcagctggaaggttgggagcaggcaatgtcacagcgtacggcgacccctatgggccacattggcgaaccgaatgacatcgcatggatctgtgtgtacctggcatctgacgaatcgaaatttgcgacgggtgcagaatttgtggtcgacggcgggtacaccgcacag

SEQ ID NO: 318 - protein, 252 aa, Artificial Sequence
  Engineered Variant of Kred from Lactobacillus kefir
MTDRLKHKVAIVTGGTMGIGLAIADKFVEEGAKVVITGRHADVGEKAAKSIGGSDVIRFVQHDASEEAGWTSLFDTTEEAFGPVTTLVNNAGIGVIKSVERTTTEEWRKVLSVNLDGVFFGTRLGIQRMKNKGLGASIINMSSIMGLVGYPAAGAYNASKGAVRIMSKSAALDCALKDYDVRVNTVHPGAIKTERKDQLEGWEQAMSQRTATPMGHIGEPNDIAWICVYLASDESKFATGAEFVVDGGYTAQ

SEQ ID NO: 319 - DNA, 756 bp, Artificial Sequence
  Engineered Variant of Kred from Lactobacillus kefir
atgaccgatcgtctgaagcacaaagtagccatcgtcaccggcgggacaatgggtatcggtttggcaatcgccgataaatttgtagaggagggtgcgaaagtagttattactggtcgtcacgcggatgtaggtgagaaagccgccaaatcaatcggtggcagtgatgttattcgctttgtccagcacgatgcgtccgaagaagcaggctggacgagtctgttcgacaccaccgaggaggcattcggcccggttacgaccctggtgaacaatgcagggattggggtaattaagagcgttgaacggactaccacggaggaatggcgtgatgttctgtccgttaatctggatggtgtttttttcggcacccgtctgggcattcagcgcatgaaaaataaaggcttgggcgctagcatcatcaatatgagcagtattatggggctggtaggctatccggccgccggggcatacaacgcttccaagggggcggtacgtatcatgtcgaaaagcgcagcgctggattgcgcactgaaggactacgatgtgcgtgtcaacacagtacatccgggcgcgatcaagaccgagcggaaggatcagctggaaggttgggagcaagcaatgtcacagcgtacggcgacccctatgggccacattggcgaaccgaatgacatcgcatggatctgtgtgtacctggcatctgacgaatcgaaatttgcgacgggtgcagaatttgtggtcgacggcgggtacaccgcacag

SEQ ID NO: 320 - protein, 252 aa, Artificial Sequence
  Engineered Variant of Kred from Lactobacillus kefir
MTDRLKHKVAIVTGGTMGIGLAIADKFVEEGAKVVITGRHADVGEKAAKSIGGSDVIRFVQHDASEEAGWTSLFDTTEEAFGPVTTLVNNAGIGVIKSVERTTTEEWRDVLSVNLDGVFFGTRLGIQRMKNKGLGASIINMSSIMGLVGYPAAGAYNASKGAVRIMSKSAALDCALKDYDVRVNTVHPGAIKTERKDQLEGWEQAMSQRTATPMGHIGEPNDIAWICVYLASDESKFATGAEFVVDGGYTAQ

SEQ ID NO: 321 - DNA, 756 bp, Artificial Sequence
  Engineered Variant of Kred from Lactobacillus kefir
atgaccgatcgtctgaagcacaaagtagccatcgtcaccggcgggacaatgggtatcggtttggcaatcgccgataaatttgtagaggagggtgcgaaagtagttattactggtcgtcacgcggatgtaggtgagaaagccgccaaatcaatcggtggcagtgatgttattcgctttgtccagcacgatgcgtccgaagaagcaggctggacgaccctgttcgacaccaccgaggaggcattcggcccggttacgaccctggtgaacaatgcagggattggggtaattaagagcgttgaacggactaccacggaggaatggcgtaaagttctgtccgttaatctggatggtgtttttttcggcacccgtctgggcattcagcgcatgaaaaataaaggcttgggcgctagcatcatcaatatgagcagtattatggggctggtaggctatccggccgccggggcatacaacgcttccaagggggcggtacgtatcatgtcgaaaagcgcagcgctggattgcgcactgaaggactacgatgtgcgtgtcaacacagtacatccgggcgcgatcaagaccgagcggaaggatcagctggaaggttgggagcaggcaatgtcacagcgtacggcgacccctatgggccacattggcgaaccgaatgacatcgcatggatctgtgtgtacctggcatctgacgaatcgaaatttgcgacgggtgcagaatttgtggtcgacggcgggtacaccgcacag

SEQ ID NO: 322 - protein, 252 aa, Artificial Sequence
  Engineered Variant of Kred from Lactobacillus kefir
MTDRLKHKVAIVTGGTMGIGLAIADKFVEEGAKVVITGRHADVGEKAAKSIGGSDVIRFVQHDASEEAGWTTLFDTTEEAFGPVTTLVNNAGIGVIKSVERTTTEEWRKVLSVNLDGVFFGTRLGIQRMKNKGLGASIINMSSIMGLVGYPAAGAYNASKGAVRIMSKSAALDCALKDYDVRVNTVHPGAIKTERKDQLEGWEQAMSQRTATPMGHIGEPNDIAWICVYLASDESKFATGAEFVVDGGYTAQ

SEQ ID NO: 323 - DNA, 756 bp, Artificial Sequence
  Engineered Variant of Kred from Lactobacillus kefir
atgaccgatcgtctgaagcacaaagtagccatcatcaccggcgggacaatgggtatcggtttggcaatcgccgataaatttgtagaggagggtgcgaaagtagttattactggtcgtcacgcggatgtaggtgagaaagccgccaaatcaatcggtggcagtgatgttattcgctttgtccagcacgatgcgtccgaagaagcaggctggacgagcctgttcgacaccaccgaggaggcattcggcccggttacgaccctggtgaacaatgcaggggctggggtaattaagagcgttgaacggactaccacggaggaatggcgtaaagttctgtccgttaatctggatggtgtttttttcggcacccgtctgggcattcagcgcatgaaaaataaaggcttgggcgctagcatcatcaatatgagcagtattatggggctggtaggctatccggccgccggggcatacaacgcttccaagggggcggtacgtatcatgtcgaaaagcgcagcgctggattgcgcactgaaggactacgatgtgcgtgtcaacacagtacatccgggcgcgatcaagaccgagcggaaggatcagctggaaggttgggagcaggcaatgtcacagcgtacggcgacccctatgggccacattggcgaaccgaatgacatcgcatggatctgtgtgtacctggcatctgacgaatcgaaatttgcgacgggtgcagaatttgtggtcgacggcgggtacaccgcacag

SEQ ID NO: 324 - protein, 252 aa, Artificial Sequence
  Engineered Variant of Kred from Lactobacillus kefir
MTDRLKHKVAIITGGTMGIGLAIADKFVEEGAKVVITGRHADVGEKAAKSIGGSDVIRFVQHDASEEAGWTSLFDTTEEAFGPVTTLVNNAGAGVIKSVERTTTEEWRKVLSVNLDGVFFGTRLGIQRMKNKGLGASIINMSSIMGLVGYPAAGAYNASKGAVRIMSKSAALDCALKDYDVRVNTVHPGAIKTERKDQLEGWEQAMSQRTATPMGHIGEPNDIAWICVYLASDESKFATGAEFVVDGGYTAQ

SEQ ID NO: 325 - DNA, 756 bp, Artificial Sequence
  Engineered Variant of Kred from Lactobacillus kefir
atgaccgatcgtctgaagcacaaagtagccatcatcaccggcgggacaatgggtatcggtttggcaatcgccgataaatttgtagaggagggtgcgaaagtagttattactggtcgtcacgcggatgtaggtctgaaagccgccaaatcaatcggtggcagtgatgttattcgctttgtccagcacgatgcgtccgaagaagcaggctggacgagtctgttcgacaccaccgaggaggcattcggcccggttacgaccctggtgaacaatgcagggattggggtaattaagagcgttgaacggactaccacggaggaatggcgtgatgttctgtccgttaatctggatggtgtttttttcggcacccgtctgggcattcagcgcatgaaaaataaaggcttgggcgctagcatcatcaatatgagcagtattatggggctggtaggctatccggccgccggggcatacaacgcttccaagggggcggtacgtatcatgtcgaaaagcgcagcgctggattgcgcactgaaggactacgatgtgcgtgtcaacacagtacatccgggcgcgatcaagaccgagcggaaggatcagctggaaggttgggagcaggcaatgtcacagcgtacggcgacccctatgggccacattggcgaaccgaatgacatcgcatggatctgtgtgtacctggcatctgacgaatcgaaatttgcgacgggtgcagaatttgtggtcgacggcgggtacaccgcacag

SEQ ID NO: 326 - protein, 252 aa, Artificial Sequence
  Engineered Variant of Kred from Lactobacillus kefir
MTDRLKHKVAIITGGTMGIGLAIADKFVEEGAKVVITGRHADVGLKAAKSIGGSDVIRFVQHDASEEAGWTSLFDTTEEAFGPVTTLVNNAGIGVIKSVERTTTEEWRDVLSVNLDGVFFGTRLGIQRMKNKGLGASIINMSSIMGLVGYPAAGAYNASKGAVRIMSKSAALDCALKDYDVRVNTVHPGAIKTERKDQLEGWEQAMSQRTATPMGHIGEPNDIAWICVYLASDESKFATGAEFVVDGGYTAQ

SEQ ID NO: 327 - DNA, 756 bp, Artificial Sequence
  Engineered Variant of Kred from Lactobacillus kefir
atgaccgatcgtctgaagcacaaagtagccatcatcaccggcgggacaatgggtatcggtttggcaatcgccgataaatttgtagaggagggtgcgaaagtagttattactggtcgtcacgcggatgtaggtgagaaagccgccaaatcaatcggtggcagtgatgttattcgctttgtccagcacgatgcgtccgaagaagcaggctggacgaccctgttcgacaccaccgaggaggcattcggcccggttacgaccctggtgaacaatgcagggattggggtaattaagagcgttgaacggactaccacggaggaatggcgtgatgttctgtccgttaatctggatggtgtttttttcggcacccgtctgggcattcagcgcatgaaaaataaaggcttgggcgctagcatcatcaatatgagcagtattatggggctggtaggctatccggccgccggggcatacaacgcttccaagggggcggtacgtatcatgtcgaaaagcgcagcgctggattgcgcactgaaggactacgatgtgcgtgtcaacacagtacatccgggcgcgatcaagaccgagcggaaggatcagctggaaggttgggagcaggcaatgtcacagcgtacggcgacccctatgggccacattggcgaaccgaatgacatcgcatggatctgtgtgtacctggcatctgacgaatcgaaatttgcgacgggtgcagaatttgtggtcgacggcgggtacaccgcacag

SEQ ID NO: 328 - protein, 252 aa, Artificial Sequence
  Engineered Variant of Kred from Lactobacillus kefir
MTDRLKHKVAIITGGTMGIGLAIADKFVEEGAKVVITGRHADVGEKAAKSIGGSDVIRFVQHDASEEAGWTTLFDTTEEAFGPVTTLVNNAGIGVIKSVERTTTEEWRDVLSVNLDGVFFGTRLGIQRMKNKGLGASIINMSSIMGLVGYPAAGAYNASKGAVRIMSKSAALDCALKDYDVRVNTVHPGAIKTERKDQLEGWEQAMSQRTATPMGHIGEPNDIAWICVYLASDESKFATGAEFVVDGGYTAQ

SEQ ID NO: 329 - DNA, 756 bp, Artificial Sequence
  Engineered Variant of Kred from Lactobacillus kefir
atgaccgatcgtctgaagcacaaagtagccatcatcaccggcgggacaatgggtatcggtttggcaatcgccgataaatttgtagaggagggtgcgaaagtagttattactggtcgtcacgcggatgtaggtgagaaagccgccaaatcaatcggtggcagtgatgttattcgctttgtccagcacgatgcgtccgaagaagcaggctggacgaccctgttcgacaccaccgaggaggcattcggcccggttacgaccctggtgaacaatgcagggattggggtaattaagagcgttgaacggactaccacggaggaatggcgtgatgttctgtccgttaatctggatggtgtttttttcggcacccgtctgggcattcagcgcatgaaaaataaaggcttgggcgctagcatcatcaatatgagcagtattatggggctggtaggcgctccggccgccggggcatacaacgcttccaagggggcggtacgtatcatgtcgaaaagcgcagcgctggattgcgcactgaaggactacgatgtgcgtgtcaacacagtacatccgggcgcgatcaagaccgagtcgaaggatcagctggaaggttgggagcaggcaatgtcacagcgtacggcgacccctatgggccacattggcgaaccgaatgacatcgcatggatctgtgtgtacctggcatctgacgaatcgaaatttgcgacgggtgcagaatttgtggtcgacggcgggtacaccgcacag

SEQ ID NO: 330 - protein, 252 aa, Artificial Sequence
  Engineered Variant of Kred from Lactobacillus kefir
MTDRLKHKVAIITGGTMGIGLAIADKFVEEGAKVVITGRHADVGEKAAKSIGGSDVIRFVQHDASEEAGWTTLFDTTEEAFGPVTTLVNNAGIGVIKSVERTTTEEWRDVLSVNLDGVFFGTRLGIQRMKNKGLGASIINMSSIMGLVGAPAAGAYNASKGAVRIMSKSAALDCALKDYDVRVNTVHPGAIKTESKDQLEGWEQAMSQRTATPMGHIGEPNDIAWICVYLASDESKFATGAEFVVDGGYTAQ

SEQ ID NO: 331 - DNA, 756 bp, Artificial Sequence
  Engineered Variant of Kred from Lactobacillus kefir
atgaccgatcgtctgaagcacaaagtagccatcatcaccggcgggacaatgggtatcggtttggcaatcgccgataaatttgtagaggagggtgcgaaagtagttattactggtcgtcacgcggatgtaggtgagaaagccgccaaatcaatcggtggcagtgatgttattcgctttgtccagcacgatgcgtccgaagaagcaggctggacgaccctgttcgacaccaccgaggaggcattcggcccggttacgaccctggtgaacaatgcagggattggggtaattaagagcgttgaacggactaccacggaggaatggcgtgatgttctgtccgttaatctggatggtgtttttttcggcacccgtctgggcattcagcgcatgaaaaataaaggcttgggcgctagcatcatcaatatgagcagtattatggggctggtaggcgctccggccgccggggcatacaacgcttccaagggggcggtacgtatcatgtcgaaaagcgcagcgctggattgcgcactgaaggactacgatgtgcgtgtcaacacagtacatccgggcgcgatcaagaccgagcggaaggatcagctggaaggttgggagcaggcaatgtcacagcgtacggcgacccctatgggccacattggcgaaccgaatgacatcgcatggatctgtgtgtacctggcatctgacgaatcgaaatttgcgacgggtgcagaatttgtggtcgacggcgggtacaccgcacag

SEQ ID NO: 332 - protein, 252 aa, Artificial Sequence
  Engineered Variant of Kred from Lactobacillus kefir
MTDRLKHKVAIITGGTMGIGLAIADKFVEEGAKVVITGRHADVGEKAAKSIGGSDVIRFVQHDASEEAGWTTLFDTTEEAFGPVTTLVNNAGIGVIKSVERTTTEEWRDVLSVNLDGVFFGTRLGIQRMKNKGLGASIINMSSIMGLVGAPAAGAYNASKGAVRIMSKSAALDCALKDYDVRVNTVHPGAIKTERKDQLEGWEQAMSQRTATPMGHIGEPNDIAWICVYLASDESKFATGAEFVVDGGYTAQ

SEQ ID NO: 333 - DNA, 756 bp, Artificial Sequence
  Engineered Variant of Kred from Lactobacillus kefir
atgaccgatcgtctgaagcacaaagtagccatcatcaccggcgggacaatgggtatcggtttggcaatcgccgataaatttgtagaggagggtgcgaaagtagttattactggtcgtcacgcggatgtaggtgagaaagccgccaaatcaatcggtggcagtgatgttattcgctttgtccagcacgatgcgtccgaagaagcaggctggacgaccctgttcgacaccaccgaggaggcattcggcccggttacgaccctggtgaacaatgcagggattggggtaattaagagcgttgaacggactaccacggaggaatggcgtgatgttctgtccgttaatctggatggtgtttttttcggcacccgtctgggcattcagcgcatgaaaaataaaggcttgggcgctagcatcatcaatatgagcagtattatggggctggtaggctatccggccgccggggcatacaacgcttccaagggggcggtacgtatcatgtcgaaaagcgcagcgctggattgcgcactgaaggactacgatgtgcgtgtcaacacagtacatccgggcgcgatcaagaccgagtcgaaggatcagctggaaggttgggagcaggcaatgtcacagcgtacggcgacccctatgggccacattggcgaaccgaatgacatcgcatggatctgtgtgtacctggcatctgacgaatcgaaatttgcgacgggtgcagaatttgtggtcgacggcgggtacaccgcacag

SEQ ID NO: 334 - protein, 252 aa, Artificial Sequence
  Engineered Variant of Kred from Lactobacillus kefir
MTDRLKHKVAIITGGTMGIGLAIADKFVEEGAKVVITGRHADVGEKAAKSIGGSDVIRFVQHDASEEAGWTTLFDTTEEAFGPVTTLVNNAGIGVIKSVERTTTEEWRDVLSVNLDGVFFGTRLGIQRMKNKGLGASIINMSSIMGLVGYPAAGAYNASKGAVRIMSKSAALDCALKDYDVRVNTVHPGAIKTESKDQLEGWEQAMSQRTATPMGHIGEPNDIAWICVYLASDESKFATGAEFVVDGGYTAQ

SEQ ID NO: 335 - DNA, 756 bp, Artificial Sequence
  Engineered Variant of Kred from Lactobacillus kefir
atgaccgatcgtctgaagcacaaagtagccatcatcaccggcgggacaatgggtatcggtttggcaatcgccgataaatttgtagaggagggtgcgaaagtagttattactggtcgtcacgcggatgtaggtgagaaagccgccaaatcaatcggtggcagtgatgttattcgctttgtccagcacgatgcgtccgaagaagcaggctggacgaccctgttcgacaccaccgaggaggcattcggcccggttacgaccctggtgaacaatgcagggattggggtaattaagagcgttgaacggactaccacggaggaatggcgtgatgttctgtccgttaatctggatggtgtttttttcggcacccgtctgggcattcagcgcatgaaaaataaaggcttgggcgctagcatcatcaatatgagcagtattatggggctggtaggctatccggccgccggggcatacaacgcttccaagggggcggtacgtatcatgtcgaaaagcgcagcgctggattgcgcactgaaggactacgatgtgcgtgtcaacacagtacatccgggcgcgatcaagaccgaggcgaaggatcagctggaaggttgggagcaggcaatgtcacagcgtacggcgacccctatgggccacattggcgaaccgaatgacatcgcatggatctgtgtgtacctggcatctgacgaatcgaaatttgcgacgggtgcagaatttgtggtcgacggcgggtacaccgcacag

SEQ ID NO: 336 - protein, 252 aa, Artificial Sequence
  Engineered Variant of Kred from Lactobacillus kefir
MTDRLKHKVAIITGGTMGIGLAIADKFVEEGAKVVITGRHADVGEKAAKSIGGSDVIRFVQHDASEEAGWTTLFDTTEEAFGPVTTLVNNAGIGVIKSVERTTTEEWRDVLSVNLDGVFFGTRLGIQRMKNKGLGASIINMSSIMGLVGYPAAGAYNASKGAVRIMSKSAALDCALKDYDVRVNTVHPGAIKTEAKDQLEGWEQAMSQRTATPMGHIGEPNDIAWICVYLASDESKFATGAEFVVDGGYTAQ

SEQ ID NO: 337 - DNA, 756 bp, Artificial Sequence; identical to SEQ ID NO: 333
  Engineered Variant of Kred from Lactobacillus kefir

SEQ ID NO: 338 - protein, 252 aa, Artificial Sequence; identical to SEQ ID NO: 334
  Engineered Variant of Kred from Lactobacillus kefir

SEQ ID NO: 339 - DNA, 756 bp, Artificial Sequence
  Engineered Variant of Kred from Lactobacillus kefir
atgaccgatcgtctgaagcacaaagtagccatcatcaccggcgggacaatgggtatcggtttggcaatcgccgataaatttgtagaggagggtgcgaaagtagttattactggtcgtcacgcggatgtaggtgagaaagccgccaaatcaatcggtggcagtgatgttattcgctttgtccagcacgatgcgtccgaagaagcaggctggacgaccctgttcgacaccaccgaggaggcattcggcccggttacgaccctggtgaacaatgcagggattggggtaattaagagcgttgaacggactaccacggaggaatggcgtgatgttctgtccgttaatctggatggtgtttttttcggcacccgtctgggcattcagcgcatgaaaaataaaggcttgggcgctagcatcatcaatatgagcagtattatggggctggtaggcgctgccgccgccggggcatacaacgcttccaagggggcggtacgtatcatgtcgaaaagcgcagcgctggattgcgcactgaaggactacgatgtgcgtgtcaacacagtacatccgggcgcgatcaagaccgagcgcaaggatcagctggaaggttgggagcaggcaatgtcacagcgtacggcgacccctatgggccacattggcgaaccgaatgacatcgcatggatctgtgtgtacctggcatctgacgaatcgaaatttgcgacgggtgcagaatttgtggtcgacggcgggtacaccgcacag

SEQ ID NO: 340 - protein, 252 aa, Artificial Sequence
  Engineered Variant of Kred from Lactobacillus kefir
MTDRLKHKVAIITGGTMGIGLAIADKFVEEGAKVVITGRHADVGEKAAKSIGGSDVIRFVQHDASEEAGWTTLFDTTEEAFGPVTTLVNNAGIGVIKSVERTTTEEWRDVLSVNLDGVFFGTRLGIQRMKNKGLGASIINMSSIMGLVGAAAAGAYNASKGAVRIMSKSAALDCALKDYDVRVNTVHPGAIKTERKDQLEGWEQAMSQRTATPMGHIGEPNDIAWICVYLASDESKFATGAEFVVDGGYTAQ

SEQ ID NO: 341 - DNA, 756 bp, Artificial Sequence; identical to SEQ ID NO: 329
  Engineered Variant of Kred from Lactobacillus kefir

SEQ ID NO: 342 - protein, 252 aa, Artificial Sequence; identical to SEQ ID NO: 330
  Engineered Variant of Kred from Lactobacillus kefir

SEQ ID NO: 343 - DNA, 756 bp, Artificial Sequence
  Engineered Variant of Kred from Lactobacillus kefir
atgaccgatcgtctgaagcacaaagtagccatcatcaccggcgggacaatgggtatcggtttggcaatcgccgataaatttgtagaggagggtgcgaaagtagttattactggtcgtcacgcggatgtaggtgagaaagccgccaaatcaatcggtggcagtgatgttattcgctttgtccagcacgatgcgtccgaagaagcaggctggacgaccctgttcgacaccaccgaggaggcattcggcccggttacgaccctggtgaacaatgcagggatcgggcgtattaagagcgttgaacggactaccacggaggaatggcgtgatgttctgtccgttaatctggatggtgtttttttcggcacccgtctgggcattcagcgcatgaaaaataaaggcttgggcgctagcatcatcaatatgagcagtattatggggctggtaggcgctccggccgccggggcatacaacgcttccaagggggcggtacgtatcatgtcgaaaagcgcagcgctggattgcgcactgaaggactacgatgtgcgtgtcaacacagtacatccgggcgcgatcaagaccgagcgcaaggatcagctggaaggttgggagcaggcaatgtcacagcgtacggcgacccctatgggccacattggcgaaccgaatgacatcgcatggatctgtgtgtacctggcatctgacgaatcgaaatttgcgacgggtgcagaatttgtggtcgacggcgggtacaccgcacag

SEQ ID NO: 344 - protein, 252 aa, Artificial Sequence
  Engineered Variant of Kred from Lactobacillus kefir
MTDRLKHKVAIITGGTMGIGLAIADKFVEEGAKVVITGRHADVGEKAAKSIGGSDVIRFVQHDASEEAGWTTLFDTTEEAFGPVTTLVNNAGIGRIKSVERTTTEEWRDVLSVNLDGVFFGTRLGIQRMKNKGLGASIINMSSIMGLVGAPAAGAYNASKGAVRIMSKSAALDCALKDYDVRVNTVHPGAIKTERKDQLEGWEQAMSQRTATPMGHIGEPNDIAWICVYLASDESKFATGAEFVVDGGYTAQ

SEQ ID NO: 345 - DNA, 756 bp, Artificial Sequence
  Engineered Variant of Kred from Lactobacillus kefir
atgaccgatcgtctgaagcacaaagtagccatcatcaccggcgggacaatgggtatcggtttggcaatcgccgataaatttgtagaggagggtgcgaaagtagttattactggtcgtcacgcggatgtaggtgagaaagccgccaaatcaatcggtggcagtgatgttattcgctttgtccagcacgatgcgtccgaagaagcaggctggacgaccctgttcgacaccaccgaggaggcattcggcccggttacgaccctggtgaacaatgcaggggcaggggtcattaagagcgttgaacggactaccacggaggaatggcgtgatgttctgtccgttaatctggatggtgtttttttcggcacccgtctgggcattcagcgcatgaaaaataaaggcttgggcgctagcatcatcaatatgagcagtattatggggctggtaggcgctccggccgccggggcatacaacgcttccaagggggcggtacgtatcatgtcgaaaagcgcagcgctggattgcgcactgaaggactacgatgtgcgtgtcaacacagtacatccgggcgcgatcaagaccgagcgcaaggatcagctggaaggttgggagcaggcaatgtcacagcgtacggcgacccctatgggccacattggcgaaccgaatgacatcgcatggatctgtgtgtacctggcatctgacgaatcgaaatttgcgacgggtgcagaatttgtggtcgacggcgggtacaccgcacag

SEQ ID NO: 346 - protein, 252 aa, Artificial Sequence
  Engineered Variant of Kred from Lactobacillus kefir
MTDRLKHKVAIITGGTMGIGLAIADKFVEEGAKVVITGRHADVGEKAAKSIGGSDVIRFVQHDASEEAGWTTLFDTTEEAFGPVTTLVNNAGAGVIKSVERTTTEEWRDVLSVNLDGVFFGTRLGIQRMKNKGLGASIINMSSIMGLVGAPAAGAYNASKGAVRIMSKSAALDCALKDYDVRVNTVHPGAIKTERKDQLEGWEQAMSQRTATPMGHIGEPNDIAWICVYLASDESKFATGAEFVVDGGYTAQ

SEQ ID NO: 347 - DNA, 756 bp, Artificial Sequence
  Engineered Variant of Kred from Lactobacillus kefir
atgaccgatcgtctgaagcacaaagtagccatcatcaccggcgggacaatgggtatcggtttggcaatcgccgataaatttgtagaggagggtgcgaaagtagttattactggtcgtcacgcggatgtaggtgagaaagccgccaaatcaatcggtggcagtgatgttattcgctttgtccagcacgatgcgtccgaagaagcaggctggacgaccctgttcgacaccaccgaggaggcattcggcccggttacgaccctggtgaacaatgcaggggcagggcgtattaagagcgttgaacggactaccacggaggaatggcgtgatgttctgtccgttaatctggatggtgtttttttcggcacccgtctgggcattcagcgcatgaaaaataaaggcttgggcgctagcatcatcaatatgagcagtattgctgggctggtaggcgctccggccgccggggcatacaacgcttccaagggggcggtacgtatcatgtcgaaaagcgcagcgctggattgcgcactgaaggactacgatgtgcgtgtcaacacagtacatccgggcgcgatcaagaccgagcgcaaggatcagctggaaggttgggagcaggcaatgtcacagcgtacggcgacccctatgggccacattggcgaaccgaatgacatcgcatggatctgtgtgtacctggcatctgacgaatcgaaatttgcgacgggtgcagaatttgtggtcgacggcgggtacaccgcacag

SEQ ID NO: 348 - protein, 252 aa, Artificial Sequence
  Engineered Variant of Kred from Lactobacillus kefir
MTDRLKHKVAIITGGTMGIGLAIADKFVEEGAKVVITGRHADVGEKAAKSIGGSDVIRFVQHDASEEAGWTTLFDTTEEAFGPVTTLVNNAGAGRIKSVERTTTEEWRDVLSVNLDGVFFGTRLGIQRMKNKGLGASIINMSSIAGLVGAPAAGAYNASKGAVRIMSKSAALDCALKDYDVRVNTVHPGAIKTERKDQLEGWEQAMSQRTATPMGHIGEPNDIAWICVYLASDESKFATGAEFVVDGGYTAQ

SEQ ID NO: 349 - DNA, 756 bp, Artificial Sequence
  Engineered Variant of Kred from Lactobacillus kefir
atgaccgatcgtctgaagcacaaagtagccatcatcaccggcgggacaatgggtatcggtttggcaatcgccgataaatttgtagaggagggtgcgaaagtagttattactggtcgtcacgcggatgtaggtgagaaagccgccaaatcaatcggtggcagtgatgttattcgctttgtccagcacgatgcgtccgaagaagcaggctggacgaccctgttcgacaccaccgaggaggcattcggcccggttacgaccctggtgaacaatgcaggggcaggggtcattaagagcgttgaacggactaccacggaggaatggcgtaaagttctgtccgtcactctggatggtgtttttttcggcacccgtctgggcattcagcgcatgaaaaataaaggcttgggcgctagcatcatcaatatgagcagtattgctgggctggtaggcgctccggccgccggggcatacaacgcttccaagggggcggtacgtatcatgtcgaaaagcgcagcgctggattgcgcactgaaggactacgatgtgcgtgtcaacacagtacatccgggcgcgatcaagaccgagcgcaaggatcagctggaaggttgggagcaggcaatgtcacagcgtacggcgacccctatgggccacattggcgaaccgaatgacatcgcatggatctgtgtgtacctggcatctgacgaatcgaaatttgcgacgggtgcagaatttgtggtcgacggcgggtacaccgcacag

SEQ ID NO: 350 - protein, 252 aa, Artificial Sequence
  Engineered Variant of Kred from Lactobacillus kefir
MTDRLKHKVAIITGGTMGIGLAIADKFVEEGAKVVITGRHADVGEKAAKSIGGSDVIRFVQHDASEEAGWTTLFDTTEEAFGPVTTLVNNAGAGVIKSVERTTTEEWRKVLSVTLDGVFFGTRLGIQRMKNKGLGASIINMSSIAGLVGAPAAGAYNASKGAVRIMSKSAALDCALKDYDVRVNTVHPGAIKTERKDQLEGWEQAMSQRTATPMGHIGEPNDIAWICVYLASDESKFATGAEFVVDGGYTAQ

SEQ ID NO: 351 - DNA, 756 bp, Artificial Sequence
  Engineered Variant of Kred from Lactobacillus kefir
atgaccgatcgtctgaagcacaaagtagccatcatcaccggcgggacaatgggtatcggtttggcaatcgccgataaatttgtagaggagggtgcgaaagtagttattactggtcgtcacgcggatgtaggtgagaaagccgccaaatcaatcggtggcagtgatgttattcgctttgtccagcacgatgcgtccgaagaagcaggctggacgaccctgttcgacaccaccgaggaggcattcggcccggttacgaccctggtgaacaatgcagggattggggtaattaagagcgttgaacggactaccacggaggaatggcgtgatgttctgtccgttaatctggatggtgtttttttcggcacccgtctgggcattcagcgcatgaaaaataaaggcttgggcgctagcatcatcaatatgagcagtattgctgggctggtaggcgctccggccgccggggcatacaacgcttccaagggggcggtacgtatcatgtcgaaaagcgcagcgctggattgcgcactgaaggactacgatgtgcgtgtcaacacagtacatccgggcgcgatcaagaccgaggcgaaggatcagctggaaggttgggagcaggcaatgtcacagcgtacggcgacccctatgggccacattggcgaaccgaatgacatcgcatggatctgtgtgtacctggcatctgacgaatcgaaatttgcgacgggtgcagaatttgtggtcgacggcgggtacaccgcacag

SEQ ID NO: 352 - protein, 252 aa, Artificial Sequence
  Engineered Variant of Kred from Lactobacillus kefir
MTDRLKHKVAIITGGTMGIGLAIADKFVEEGAKVVITGRHADVGEKAAKSIGGSDVIRFVQHDASEEAGWTTLFDTTEEAFGPVTTLVNNAGIGVIKSVERTTTEEWRDVLSVNLDGVFFGTRLGIQRMKNKGLGASIINMSSIAGLVGAPAAGAYNASKGAVRIMSKSAALDCALKDYDVRVNTVHPGAIKTEAKDQLEGWEQAMSQRTATPMGHIGEPNDIAWICVYLASDESKFATGAEFVVDGGYTAQ

SEQ ID NO: 353 - DNA, 756 bp, Artificial Sequence
  Engineered Variant of Kred from Lactobacillus kefir
atgaccgatcgtctgaagcacaaagtagccatcatcaccggcgggacaatgggtatcggtttggcaatcgccgataaatttgtagaggagggtgcgaaagtagttattactggtcgtcacgcggatgtaggtgagaaagccgccaaatcaatcggtggcagtgatgttattcgctttgtccagcacgatgcgtccgaagaagcaggctggacgaccctgttcgacaccaccgaggaggcattcggcccggttacgaccctggtgaacaatgcagggatcggggtcattaagagcgttgaacggactaccacggaggaatggcgtgatgttctgtccgttaatctggatggtgtttttttcggcacccgtctgggcattcagcgcatgaaaaataaaggcttgggcgctagcatcatcaatatgagcagtattatggggctggtaggcgctccggccgccggggcatacaacgcttccaagggggcggtacgtatcatgtcgaaaagcgcagcgctggattgcgcactgaaggactacgatgtgcgtgtcaacacagtacatccgggcgcgatcaagaccgagcgcaaggatcagctggaaggttgggagcaggcaatgtcacagcgtacggcgacccctatgggccacattggcgaaccgaatgacatcgcatggatctgtgtgtacctggcatctgacgaatcgaaatttgcgacgggtgcagaatttgtggtcgacggcgggtacaccgcacag

SEQ ID NO: 354 - protein, 252 aa, Artificial Sequence; identical to SEQ ID NO: 332
  Engineered Variant of Kred from Lactobacillus kefir

SEQ ID NO: 355 - DNA, 756 bp, Artificial Sequence
  Engineered Variant of Kred from Lactobacillus kefir
atgaccgatcgtctgaagcacaaagtagccatcatcaccggcgggacaatgggtatcggtttggcaatcgccgataaatttgtagaggagggtgcgaaagtagttattactggtcgtcacgcggatgtaggtgaaaaagccgccaaatcaatcggtggcagtgatgttattcgctttgtccagcacgatgcgtccgaagaagcaggctggacgaagctgttcgacaccaccgaggaggcattcggcccggttacgaccctggtgaacaatgcagggattggggtaattaagagcgttgaacggactaccacggaggaatggcgtgatgttctgtccgttaatctggatggtgtttttttcggcacccgtctgggcattcagcgcatgaaaaataaaggcttgggcgctagcatcatcaatatgagcagtattatggggctggtaggcgctccgatggccggggcatacaacgcttccaagggggcggtacgtatcatgtcgaaaagcgcagcgctggattgcgcactgaaggactacgatgtgcgtgtcaacacagtacatccgggcgcgatcaagaccgagcgcaaggatcagctggaaggttgggagcaggcaatgtcacagcgtacggcgacccctatgggccacattggcgaaccgaatgacatcgcatggatctgtgtgtacctggcatctgacgaatcgaaatttgcgacgggtgcagaatttgtggtcgacggcgggtacaccgcacag

SEQ ID NO: 356 - protein, 252 aa, Artificial Sequence
  Engineered Variant of Kred from Lactobacillus kefir
MTDRLKHKVAIITGGTMGIGLAIADKFVEEGAKVVITGRHADVGEKAAKSIGGSDVIRFVQHDASEEAGWTKLFDTTEEAFGPVTTLVNNAGIGVIKSVERTTTEEWRDVLSVNLDGVFFGTRLGIQRMKNKGLGASIINMSSIMGLVGAPMAGAYNASKGAVRIMSKSAALDCALKDYDVRVNTVHPGAIKTERKDQLEGWEQAMSQRTATPMGHIGEPNDIAWICVYLASDESKFATGAEFVVDGGYTAQ

SEQ ID NO: 357 - DNA, 756 bp, Artificial Sequence
  Engineered Variant of Kred from Lactobacillus kefir
atgaccgatcgtctgaagcacaaagtagccatcgtcaccggcgggacaatgggtatcggtttggcaatcgccgataaatttgtagaggagggtgcgaaagtagttattactggtcgtcacgcggatgtaggtgaaaaagccgccaaatcaatcggtggcagtgatgttattcgctttgtccagcacgatgcgtccgaagaagcaggctggacgtcgctgttcgacaccaccgaggaggcattcggcccggttacgaccctggtgaacaatgcagggattggggtaattaagagcgttgaacggactaccacggaggaatggcgtaaggttctgtccgttaatctggatggtgtttttttcggcacccgtctgggcattcagcgcatgaaaaataaaggcttgggcgctagcatcatcaatatgagcagtattatggggctggtaggcgctccggccgccggggcatacaacgcttccaagggggcggtacgtatcatgtcgaaaagcgcagcgctggattgcgcactgaaggactacgatgtgcgtgtcaacacagtacatccgggcgcgatcaagaccgagcgcaaggatcagctggaaggttgggagcaggcaatgtcacagcgtacggcgacccctatgggccacattggcgaaccgaatgacatcgcatggatctgtgtgtacctggcatctgacgaatcgaaatttgcgacgggtgcagaatttgtggtcgacggcgggtacaccgcacag

SEQ ID NO: 358 - protein, 252 aa, Artificial Sequence
  Engineered Variant of Kred from Lactobacillus kefir
MTDRLKHKVAIVTGGTMGIGLAIADKFVEEGAKVVITGRHADVGEKAAKSIGGSDVIRFVQHDASEEAGWTSLFDTTEEAFGPVTTLVNNAGIGVIKSVERTTTEEWRKVLSVNLDGVFFGTRLGIQRMKNKGLGASIINMSSIMGLVGAPAAGAYNASKGAVRIMSKSAALDCALKDYDVRVNTVHPGAIKTERKDQLEGWEQAMSQRTATPMGHIGEPNDIAWICVYLASDESKFATGAEFVVDGGYTAQ

SEQ ID NO: 359 - DNA, 756 bp, Artificial Sequence
  Engineered Variant of Kred from Lactobacillus kefir
atgaccgatcgtctgaagcacaaagtagccatcatcaccggcgggacaatgggtatcggtttggcaatcgccgataaatttgtagaggagggtgcgaaagtagttattactggtcgtcacgcggatgtaggtgaaaaagccgccaaatcaatcggtggcagtgatgttattcgctttgtccagcacgatgcgtccgaagaagcaggctggacgtcgctgttcgacaccaccgaggaggcattcggcccggttacgaccctggtgaacaatgcagggattggggtaattaagagcgttgaacggactaccacggaggaatggcgtaaggttctgtccgttaatctggatggtgtttttttcggcacccgtctgggcattcagcgcatgaaaaataaaggcttgggcgctagcatcatcaatatgagcagtattatggggctggtaggcgctccgatggccggggcatacaacgcttccaagggggcggtacgtatcatgtcgaaaagcgcagcgctggattgcgcactgaaggactacgatgtgcgtgtcaacacagtacatccgggcgcgatcaagaccgagcgcaaggatcagctggaaggttgggagcaggcaatgtcacagcgtacggcgacccctatgggccacattggcgaaccgaatgacatcgcatggatctgtgtgtacctggcatctgacgaatcgaaatttgcgacgggtgcagaatttgtggtcgacggcgggtacaccgcacag

SEQ ID NO: 360 - protein, 252 aa, Artificial Sequence
  Engineered Variant of Kred from Lactobacillus kefir
MTDRLKHKVAIITGGTMGIGLAIADKFVEEGAKVVITGRHADVGEKAAKSIGGSDVIRFVQHDASEEAGWTSLFDTTEEAFGPVTTLVNNAGIGVIKSVERTTTEEWRKVLSVNLDGVFFGTRLGIQRMKNKGLGASIINMSSIMGLVGAPMAGAYNASKGAVRIMSKSAALDCALKDYDVRVNTVHPGAIKTERKDQLEGWEQAMSQRTATPMGHIGEPNDIAWICVYLASDESKFATGAEFVVDGGYTAQ

SEQ ID NO: 361 - DNA, 756 bp, Artificial Sequence
  Engineered Variant of Kred from Lactobacillus kefir
atgaccgatcgtctgaagcacaaagtagccatcatcaccggcgggacaatgggtatcggtttggcaatcgccgataaatttgtagaggagggtgcgaaagtagttattactggtcgtcacgcggatgtaggtgaaaaagccgccaaatcaatcggtggcagtgatgttattcgctttgtccagcacgatgcgtccgaagaagcaggctggacgtcgctgttcgacaccaccgaggaggcattcggcccggttacgaccctggtgaacaatgcagggattggggtaattaagagcgttgaacggactaccacggaggaatggcgtaaggttctgtccgttaatctggatggtgtttttttcggcacccgtctgggcattcagcgcatgaaaaataaaggcttgggcgctagcatcatcaatatgagcagtattatggggctggtaggcgctccggccgccggggcatacaacgcttccaagggggcggtacgtatcatgtcgaaaagcgcagcgctggattgcgcactgaaggactacgatgtgcgtgtcaacacagtacatccgggcgcgatcaagaccgagcgcaaggatcagctggaaggttgggagcaggcaatgtcacagcgtacggcgacccctatgggccacattggcgaaccgaatgacatcgcatggatctgtgtgtacctggcatctgacgaatcgaaatttgcgacgggtgcagaatttgtggtcgacggcgggtacaccgcacag

SEQ ID NO: 362 - protein, 252 aa, Artificial Sequence
  Engineered Variant of Kred from Lactobacillus kefir
MTDRLKHKVAIITGGTMGIGLAIADKFVEEGAKVVITGRHADVGEKAAKSIGGSDVIRFVQHDASEEAGWTSLFDTTEEAFGPVTTLVNNAGIGVIKSVERTTTEEWRKVLSVNLDGVFFGTRLGIQRMKNKGLGASIINMSSIMGLVGAPAAGAYNASKGAVRIMSKSAALDCALKDYDVRVNTVHPGAIKTERKDQLEGWEQAMSQRTATPMGHIGEPNDIAWICVYLASDESKFATGAEFVVDGGYTAQ

SEQ ID NO: 363 - DNA, 756 bp, Artificial Sequence
  Engineered Variant of Kred from Lactobacillus kefir
atgaccgatcgtctgaagcacaaagtagccatcatcaccggcgggacaatgggtatcggtttggcaatcgccgataaatttgtagaggagggtgcgaaagtagttattactggtcgtcacgcggatgtaggtgaaaaagccgccaaatcaatcggtggcagtgatgttattcgctttgtccagcacgatgcgtccgaagaagcaggctggacgaagctgttcgacaccaccgaggaggcattcggcccggttacgaccctggtgaacaatgcagggattggggtaattaagagcgttgaacggactaccacggaggaatggcgtgatgttctgtccgttaatctggatggtgtttttttcggcacccgtctgggcattcagcgcatgaaaaataaaggcttgggcgctagcatcatcaatatgagcagtattatggggctggtaggcgctccggccgccggggcatacaacgcttccaagggggcggtacgtatcatgtcgaaaagcgcagcgctggattgcgcactgaaggactacgatgtgcgtgtcaacacagtacatccgggcgcgatcaagaccgagcgcaaggatcagctggaaggttgggagcaggcaatgtcacagcgtacggcgacccctatgggccacattggcgaaccgaatgacatcgcatggatctgtgtgtacctggcatctgacgaatcgaaatttgcgacgggtgcagaatttgtggtcgacggcgggtacaccgcacag

SEQ ID NO: 364 - protein, 252 aa, Artificial Sequence
  Engineered Variant of Kred from Lactobacillus kefir
MTDRLKHKVAIITGGTMGIGLAIADKFVEEGAKVVITGRHADVGEKAAKSIGGSDVIRFVQHDASEEAGWTKLFDTTEEAFGPVTTLVNNAGIGVIKSVERTTTEEWRDVLSVNLDGVFFGTRLGIQRMKNKGLGASIINMSSIMGLVGAPAAGAYNASKGAVRIMSKSAALDCALKDYDVRVNTVHPGAIKTERKDQLEGWEQAMSQRTATPMGHIGEPNDIAWICVYLASDESKFATGAEFVVDGGYTAQ

SEQ ID NO: 365 - DNA, 756 bp, Artificial Sequence
  Engineered Variant of Kred from Lactobacillus kefir
atgaccgatcgtctgaagcacaaagtagccatcatcaccggcgggacaatgggtatcggtttggcaatcgccgataaatttgtagaggagggtgcgaaagtagttattactggtcgtcacgcggatgtaggtgagaaagccgccaaatcaatcggtggcagtgatgttattcgctttgtccagcacgatgcgtccgaagaagcaggctggacgaccctgttcgacaccaccgaggaggcattcggcccggttacgaccctggtgaacaatgcaggggccggggtaattaagagcgttgaacggactaccacggaggaatggcgtgatgttctgtccgttaatctggatggtgtttttttcggcacccgtctgggcattcagcgcatgaaaaataaaggcttgggcgctagcatcatcaatatgagcagtattatggggctggtaggcgctccggccgccggggcatacaacgcttccaagggggcggtacgtatcatgtcgaaaagcgcagcgctggattgcgcactgaaggactacgatgtgcgtgtcaacacagtacatccgggcgcgatcaagaccgagtcgaaggatcagctggaaggttgggagcaggcaatgtcacagcgtacggcgacccctatgggccacattggcgaaccgaatgacatcgcatggatctgtgtgtacctggcatctgacgaatcgaaatttgcgacgggtgcagaatttgtggtcgacggcgggtacaccgcacag

SEQ ID NO: 366 - protein, 252 aa, Artificial Sequence
  Engineered Variant of Kred from Lactobacillus kefir
MTDRLKHKVAIITGGTMGIGLAIADKFVEEGAKVVITGRHADVGEKAAKSIGGSDVIRFVQHDASEEAGWTTLFDTTEEAFGPVTTLVNNAGAGVIKSVERTTTEEWRDVLSVNLDGVFFGTRLGIQRMKNKGLGASIINMSSIMGLVGAPAAGAYNASKGAVRIMSKSAALDCALKDYDVRVNTVHPGAIKTESKDQLEGWEQAMSQRTATPMGHIGEPNDIAWICVYLASDESKFATGAEFVVDGGYTAQ

SEQ ID NO: 367 - DNA, 756 bp, Artificial Sequence
  Engineered Variant of Kred from Lactobacillus kefir
atgaccgatcgtctgaagcacaaagtagccatcatcaccggcgggacaatgggtatcggtttggcaatcgccgataaatttgtagaggagggtgcgaaagtagttattactggtcgtcacgcggatgtaggtgagaaagccgccaaatcaatcggtggcagtgatgttattcgctttgtccagcacgatgcgtccgaagaagcaggctggacgaccctgttcgacaccaccgaggaggcattcggcccggttacgaccctggtgaacaatgcagggattggggtaattaagagcgttgaacggactaccacggaggaatggcgtgatgttctgtccgttaatctggatggtgtttttttcggcacccgtctgggcattcagcgcatgaaaaataaaggcttgggcgctagcatcatcaatatgagcagtattatggggctggtaggcgctccggccgccggggcatacaacgcttccaagggggcggtacgtatcatgtcgaaaagcgcagcgctggattgcgcactgaaggactacgatgttcgtgtcaacacagtacatccgggcgcgatcaagaccaactcgaaggatcagctggagggttgggagcaggcaatgtcacagcgtacggcgacccctatgggccacattggcgaaccgaatgacatcgcatggatctgtgtgtacctggcatctgacgaatcgaaatttgcgacgggtgcagaatttgtggtcgacggcgggtacaccgcacag

SEQ ID NO: 368 - protein, 252 aa, Artificial Sequence
  Engineered Variant of Kred from Lactobacillus kefir
MTDRLKHKVAIITGGTMGIGLAIADKFVEEGAKVVITGRHADVGEKAAKSIGGSDVIRFVQHDASEEAGWTTLFDTTEEAFGPVTTLVNNAGIGVIKSVERTTTEEWRDVLSVNLDGVFFGTRLGIQRMKNKGLGASIINMSSIMGLVGAPAAGAYNASKGAVRIMSKSAALDCALKDYDVRVNTVHPGAIKTNSKDQLEGWEQAMSQRTATPMGHIGEPNDIAWICVYLASDESKFATGAEFVVDGGYTAQ

SEQ ID NO: 369 - DNA, 756 bp, Artificial Sequence
  Engineered Variant of Kred from Lactobacillus kefir
atgaccgatcgtctgaagcacaaagtagccatcatcaccggcgggacaatgggtatcggtttggcaatcgccgataaatttgtagaggagggtgcgaaagtagttattactggtcgtcacgcggatgtaggtgagaaagccgccaaatcaatcggtggcagtgatgttattcgctttgtccagcacgatgcgtccgaagaagcaggctggacgaccctgttcgacaccaccgaggaggcattcggcccggttacgaccctggtgaacaatgcagggattggggtaattaagagcgttgaacggactaccacggaggaatggcgtgatgttctgtccgttaatctggatggtgtttttttcggcacccgtctgggcattcagcgcatgaaaaataaaggcttgggcgctagcatcatcaatatgagcagtattatggggctggtaggcgctccggccgccggggcatacaacgcttccaagggggcggtacgtatcatgtcgaaaagcgcagcgctggattgcgcactgaaggactacgatgttcgtgtcaacacagtacatccgggcgcgatcaagaccaactcgaaggatcagctgccaggttgggagcaggcaatgtcacagcgtacggcgacccctatgggccacattggcgaaccgaatgacatcgcatggatctgtgtgtacctggcatctgacgaatcgaaatttgcgacgggtgcagaatttgtggtcgacggcgggtacaccgcacag

SEQ ID NO: 370 - protein, 252 aa, Artificial Sequence
  Engineered Variant of Kred from Lactobacillus kefir
MTDRLKHKVAIITGGTMGIGLAIADKFVEEGAKVVITGRHADVGEKAAKSIGGSDVIRFVQHDASEEAGWTTLFDTTEEAFGPVTTLVNNAGIGVIKSVERTTTEEWRDVLSVNLDGVFFGTRLGIQRMKNKGLGASIINMSSIMGLVGAPAAGAYNASKGAVRIMSKSAALDCALKDYDVRVNTVHPGAIKTNSKDQLPGWEQAMSQRTATPMGHIGEPNDIAWICVYLASDESKFATGAEFVVDGGYTAQ

SEQ ID NO: 371 - DNA, 756 bp, Artificial Sequence
  Engineered Variant of Kred from Lactobacillus kefir
atgaccgatcgtctgaagcacaaagtagccatcatcaccggcgggacaatgggtatcggtttggcaatcgccgataaatttgtagaggagggtgcgaaagtagttattactggtcgtcacgcggatgtaggtgagaaagccgccaaatcaatcggtggcagtgatgttattcgctttgtccagcacgatgcgtccgaagaagcaggctggacgaccctgttcgacaccaccgaggaggcattcggcccggttacgaccctggtgaacaatgcagggattggggtaattaagagcgttgaacggactaccacggaggaatggcgtgatgttctgtccgttaatctggatggtgtttttttcggcacccgtctgggcattcagcgcatgaaaaataaaggcttgggcgctagcatcatcaatatgagcagtattatggggctggtaggcgctccggccgccggggcatacaacgcttccaagggggcggtacgtatcatgtcgaaaagcgcagcgctggattgcgcactgaaggactacgatgtgcgtgtcaacacagtacatccgggcgcgatcaagaccgaatcgaaggatcagctgccaggttgggagcaggcaatgtcacagcgtacggcgacccctatgggccacattggcgaaccgaatgacatcgcatggatctgtgtgtacctggcatctgacgaatcgaaatttgcgacgggtgcagaatttgtggtcgacggcgggtacaccgcacag

SEQ ID NO: 372 - protein, 252 aa, Artificial Sequence
  Engineered Variant of Kred from Lactobacillus kefir
MTDRLKHKVAIITGGTMGIGLAIADKFVEEGAKVVITGRHADVGEKAAKSIGGSDVIRFVQHDASEEAGWTTLFDTTEEAFGPVTTLVNNAGIGVIKSVERTTTEEWRDVLSVNLDGVFFGTRLGIQRMKNKGLGASIINMSSIMGLVGAPAAGAYNASKGAVRIMSKSAALDCALKDYDVRVNTVHPGAIKTESKDQLPGWEQAMSQRTATPMGHIGEPNDIAWICVYLASDESKFATGAEFVVDGGYTAQ

SEQ ID NO: 373 - DNA, 756 bp, Artificial Sequence
  Engineered Variant of Kred from Lactobacillus kefir
atgaccgatcgtctgaagcacaaagtagccatcatcaccggcgggacaatgggtatcggtttggcaatcgccgataaatttgtagaggagggtgcgaaagtagttattactggtcgtcacgcggatgtaggtgagaaagccgccaaatcaatcggtggcagtgatgttattcgctttgtccagcacgatgcgtccgaagaagcaggctggacgaccctgttcgacaccaccgaggcggcattcggcccggttacgaccctggtgaacaatgcagggattggggtaattaagagcgttgaacggactaccacggaggaatggcgtgatgttctgtccgttaatctggatggtgtttttttcggcacccgtctgggcattcagcgcatgaaaaataaaggcttgggcgctagcatcatcaatatgagcagtattatggggctggtaggcgctccggccgccggggcatacaacgcttccaagggggcggtacgtatcatgtcgaaaagcgcagcgctggattgcgcactgaaggactacgatgtgcgtgtcaacacagtacatccgggcgcgatcaagaccgagtcgaaggatcagctggaaggttgggagcaggcaatgtcacagcgtacggcgacccctatgggccacattggcgaaccgaatgacatcgcatggatctgtgtgtacctggcatctgacgaatcgaaatttgcgacgggtgcagaatttgtggtcgacggcgggtacaccgcacag

SEQ ID NO: 374 - protein, 252 aa, Artificial Sequence
  Engineered Variant of Kred from Lactobacillus kefir
MTDRLKHKVAIITGGTMGIGLAIADKFVEEGAKVVITGRHADVGEKAAKSIGGSDVIRFVQHDASEEAGWTTLFDTTEAAFGPVTTLVNNAGIGVIKSVERTTTEEWRDVLSVNLDGVFFGTRLGIQRMKNKGLGASIINMSSIMGLVGAPAAGAYNASKGAVRIMSKSAALDCALKDYDVRVNTVHPGAIKTESKDQLEGWEQAMSQRTATPMGHIGEPNDIAWICVYLASDESKFATGAEFVVDGGYTAQ

SEQ ID NO: 375 - DNA, 756 bp, Artificial Sequence
  Engineered Variant of Kred from Lactobacillus kefir
atgaccgatcgtctgaagcacaaagtagccatcatcaccggcgggacaatgggtatcggtttggcaatcgccgataaatttgtagaggagggtgcgaaagtagttattactggtcgtcacgcggatgtaggtgagaaagccgccaaatcaatcggtggcagtgatgttattcgctttgtccagcacgatgcgtccgaagaagcaggctggacgaccctgttcgacaccaccgaggaggcattcggcccggttacgaccctggtgaacaatgcagggattggggttccgaagagcgttgaacggactaccacggaggaatggcgtgatgttctgtccgttaatctggatggtgtttttttcggcacccgtctgggcattcagcgcatgaaaaataaaggcttgggcgctagcatcatcaatatgagcagtattatggggctggtaggcgctccggccgccggggcatacaacgcttccaagggggcggtacgtatcatgtcgaaaagcgcagcgctggattgcgcactgaaggactacgatgtgcgtgtcaacacagtacatccgggcgcgatcaagaccaactcgaaggatcagctgccaggttgggagcaggcaatgtcacagcgtacggcgacccctatgggccacattggcgaaccgaatgacatcgcatggatctgtgtgtacctggcatctgacgaatcgaaatttgcgacgggtgcagaatttgtggtcgacggcgggtacaccgcacag

SEQ ID NO: 376 - protein, 252 aa, Artificial Sequence
  Engineered Variant of Kred from Lactobacillus kefir
MTDRLKHKVAIITGGTMGIGLAIADKFVEEGAKVVITGRHADVGEKAAKSIGGSDVIRFVQHDASEEAGWTTLFDTTEEAFGPVTTLVNNAGIGVPKSVERTTTEEWRDVLSVNLDGVFFGTRLGIQRMKNKGLGASIINMSSIMGLVGAPAAGAYNASKGAVRIMSKSAALDCALKDYDVRVNTVHPGAIKTNSKDQLPGWEQAMSQRTATPMGHIGEPNDIAWICVYLASDESKFATGAEFVVDGGYTAQ

SEQ ID NO: 377 - DNA, 756 bp, Artificial Sequence
  Engineered Variant of Kred from Lactobacillus kefir
atgaccgatcgtctgaagcacaaagtagccatcatcaccggcgggacaatgggtatcggtttggcaatcgccgataaatttgtagaggagggtgcgaaagtagttattactggtcgtcacgcggatgtaggtgagaaagccgccaaatcaatcggtggcagtgatgttattcgctttgtccagcacgatgcgtccgaagaagcaggctggacgaccctgttcgacaccaccgaggaggcattcggcccggttacgaccctggtgaacaatgcagggattggggttccgaagagcgttgaacggactaccacggaggaatggagtgatgttctgtccgttaatctggatggtgtttttttcggcacccgtctgggcattcagcgcatgaaaaataaaggcttgggcgctagcatcatcaatatgagcagtattatggggatcgtaggcgctccggccgccggggcatacaacgcttccaagggggcggtacgtatcatgtcgaaaagcgcagcgctggattgcgcactgaaggactacgatgtgcgtgtcaacacagtacatccgggcgcgatcaagaccgaatcgaaggatcagctgccaggttgggagcaggcaatgtcacagcgtacggcgacccctatgggccacattggcgaaccgaatgacatcgcatggatctgtgtgtacctggcatctgacgaatcgaaatttgcgacgggtgcagaatttgtggtcgacggcgggtacaccgcacag

SEQ ID NO: 378 - protein, 252 aa, Artificial Sequence
  Engineered Variant of Kred from Lactobacillus kefir
MTDRLKHKVAIITGGTMGIGLAIADKFVEEGAKVVITGRHADVGEKAAKSIGGSDVIRFVQHDASEEAGWTTLFDTTEEAFGPVTTLVNNAGIGVPKSVERTTTEEWSDVLSVNLDGVFFGTRLGIQRMKNKGLGASIINMSSIMGIVGAPAAGAYNASKGAVRIMSKSAALDCALKDYDVRVNTVHPGAIKTESKDQLPGWEQAMSQRTATPMGHIGEPNDIAWICVYLASDESKFATGAEFVVDGGYTAQ

SEQ ID NO: 379 - DNA, 756 bp, Artificial Sequence
  Engineered Variant of Kred from Lactobacillus kefir
atgaccgatcgtctgaagcacaaagtagccatcatcaccggcgggacaatgggtatcggtttggcaatcgccgataaatttgtagaggagggtgcgaaagtagttattactggtcgtcacgcggatgtaggtgagaaagccgccaaatcaatcggtggcagtgatgttattcgctttgtccagcacgatgcgtccgaagaagcaggctggacgaccctgttcgacaccaccgaggaggcattcggcccggttacgaccctggtgaacaatgcagggattggggtaattaagagcgttgaacggactaccacggaggaatggcgtgatgttctgtccgttaatctggatggtgtttttttcggcacccgtctgggcattcagcgcatgaaaaataaaggcttgggcgctagcatcatcaatatgagcagtattatggggctggtaggcgctccggccgccggggcatacaacgcttccaagggggcggtacgtatcatgtcgaaaagcgcagcgctggattgcgcactgaaggactacgatgtgcgtgtcaacacagtacatccgggcgcgatccgcaccgagtcgaaggatcagctggaaggttgggagcaggcaatgtcacagcgtacggcgacccctatgggccacattggcgaaccgaatgacatcgcatggatctgtgtgtacctggcatctgacgaatcgaaatttgcgacgggtgcagaatttgtggtcgacggcgggtacaccgcacag

SEQ ID NO: 380 - protein, 252 aa, Artificial Sequence
  Engineered Variant of Kred from Lactobacillus kefir
MTDRLKHKVAIITGGTMGIGLAIADKFVEEGAKVVITGRHADVGEKAAKSIGGSDVIRFVQHDASEEAGWTTLFDTTEEAFGPVTTLVNNAGIGVIKSVERTTTEEWRDVLSVNLDGVFFGTRLGIQRMKNKGLGASIINMSSIMGLVGAPAAGAYNASKGAVRIMSKSAALDCALKDYDVRVNTVHPGAIRTESKDQLEGWEQAMSQRTATPMGHIGEPNDIAWICVYLASDESKFATGAEFVVDGGYTAQ

SEQ ID NO: 381 - DNA, 756 bp, Artificial Sequence
  Engineered Variant of Kred from Lactobacillus kefir
atgaccgatcgtctgaagcacaaagtagccatcatcaccggcgggacaatgggtatcggtttggcaatcgccgataaatttgtagaggagggtgcgaaagtagttattactggtcgtcacgcggatgtaggtgagaaagccgccaaatcaatcggtggcagtgatgttattcgctttgtccagcacgatgcgtccgaagaagcaggctggacgaccctgttcgacaccaccgaggaggcattcggcccggttacgaccctggtgaacaatgcagggattggggtaattaagagcgttgaacggactaccacggaggaatggcgtgatgttctgtccgttaatctggatggtgtttttttcggcacccgtctgggcattcagcgcatgaaaaataaaggcttgggcgctagcatcatcaatatgagcagtattatggggattgtaggcgctccggccgccggggcatacaacgcttccaagggggcggtacgtatcatgtcgaaaagcgcagcgctggattgcgcactgaaggactacgatgtgcgtgtcaacacagtacatccgggcgcgatcaagaccgagtcgaaggatcagctggaaggttgggagcaggcaatgtcacagcgtacggcgacccctatgggccacattggcgaaccgaatgacatcgcatggatctgtgtgtacctggcatctgacgaatcgaaatttgcgacgggtgcagaatttgtggtcgacggcgggtacaccgcacag

SEQ ID NO: 382 - protein, 252 aa, Artificial Sequence
  Engineered Variant of Kred from Lactobacillus kefir
MTDRLKHKVAIITGGTMGIGLAIADKFVEEGAKVVITGRHADVGEKAAKSIGGSDVIRFVQHDASEEAGWTTLFDTTEEAFGPVTTLVNNAGIGVIKSVERTTTEEWRDVLSVNLDGVFFGTRLGIQRMKNKGLGASIINMSSIMGIVGAPAAGAYNASKGAVRIMSKSAALDCALKDYDVRVNTVHPGAIKTESKDQLEGWEQAMSQRTATPMGHIGEPNDIAWICVYLASDESKFATGAEFVVDGGYTAQ

SEQ ID NO: 383 - DNA, 756 bp, Artificial Sequence
  Engineered Variant of Kred from Lactobacillus kefir
atgaccgatcgtctgaagcacaaagtagccatcatcaccggcgggacaatgggtatcggtttggcaatcgccgataaatttgtagaggagggtgcgaaagtagttattactggtcgtcacgcggatgtaggtgagaaagccgccaaatcaatcggtggcagtgatgttattcgctttgtccagcacgatgcgtccgaagaagcaggctggacgaccctgttcgacaccaccgaggaggcattcggcccggttacgaccctggtgaacaatgcagggattggggtaattaagagcgttgaacgcactaccacggaggaatggcgtgatgttctgtccgttaatctggatggtgtttttttcggcacccgtctgggcattcagcgcatgaaaaataaaggcttgggcgctagcatcatcaatatgagcagtattatggggatcgtaggcgctccggccgccggggcatacaacgcttccaagggggcggtacgtatcatgtcgaaaagcgcagcgctggattgcgcactgaaggactacgatgtgcgtgtcaacacagtacatccgggcgcgatcaagaccgaatcgaaggatcagctgccaggttgggagcaggcaatgtcacagcgtacggcgacccctatgggccacattggcgaaccgaatgacatcgcatggatctgtgtgtacctggcatctgacgaatcgaaatttgcgacgggtgcagaatttgtggtcgacggcgggtacaccgcacag

SEQ ID NO: 384 - protein, 252 aa, Artificial Sequence
  Engineered Variant of Kred from Lactobacillus kefir
MTDRLKHKVAIITGGTMGIGLAIADKFVEEGAKVVITGRHADVGEKAAKSIGGSDVIRFVQHDASEEAGWTTLFDTTEEAFGPVTTLVNNAGIGVIKSVERTTTEEWRDVLSVNLDGVFFGTRLGIQRMKNKGLGASIINMSSIMGIVGAPAAGAYNASKGAVRIMSKSAALDCALKDYDVRVNTVHPGAIKTESKDQLPGWEQAMSQRTATPMGHIGEPNDIAWICVYLASDESKFATGAEFVVDGGYTAQ

SEQ ID NO: 385 - DNA, 756 bp, Artificial Sequence
  Engineered Variant of Kred from Lactobacillus kefir
atgaccgatcgtctgaagcacaaagtagccatcatcaccggcgggacaatgggtatcggtttggcaatcgccgataaatttgtagaggagggtgcgaaagtagttattactggtcgtcacgcggatgtaggtgagaaagccgccaaatcaatcggtggcagtgatgttattcgctttgtccagcacgatgcgtccgaagaagcaggctggacgaccgtgttcgacaccaccgaggaggcattcggcccggttacgaccctggtgaacaatgcagggattggggtaattaagagcgttgaacggactaccacggaggaatggcgtgatgttctgtccgttaatctggatggtgtttttttcggcacccgtctgggcattcagcgcatgaaaaataaaggcttgggcgctagcatcatcaatatgagcagtattatggggctggtaggcgctccggccgccggggcatacaacgcttccaagggggcggtacgtatcatgtcgaaaagcgcagcgctggattgcgcactgaaggactacgatgtgcgtgtcaacacagtacatccgggcgcgatcaagaccgaatcgaaggatcagctggagggttgggagcaggcaatgtcacagcgtacggcgacccctatgggccacattggcgaaccgaatgacatcgcatggatctgtgtgtacctggcatctgacgaatcgaaatttgcgacgggtgcagaatttgtggtcgacggcgggtacaccgcacag

SEQ ID NO: 386 - protein, 252 aa, Artificial Sequence
  Engineered Variant of Kred from Lactobacillus kefir
MTDRLKHKVAIITGGTMGIGLAIADKFVEEGAKVVITGRHADVGEKAAKSIGGSDVIRFVQHDASEEAGWTTVFDTTEEAFGPVTTLVNNAGIGVIKSVERTTTEEWRDVLSVNLDGVFFGTRLGIQRMKNKGLGASIINMSSIMGLVGAPAAGAYNASKGAVRIMSKSAALDCALKDYDVRVNTVHPGAIKTESKDQLEGWEQAMSQRTATPMGHIGEPNDIAWICVYLASDESKFATGAEFVVDGGYTAQ

SEQ ID NO: 387 - DNA, 756 bp, Artificial Sequence
  Engineered Variant of Kred from Lactobacillus kefir
atgaccgatcgtctgaagcacaaagtagccatcatcaccggcgggacaatgggtatcggtttggcaatcgccgataaatttgtagaggagggtgcgaaagtagttattactggtcgtcacgcggatgtaggtgagaaagccgccaaatcaatcggtggcagtgatgttattcgctttgtccagcacgatgcgtccgaagaagcaggctggacgaccgtgttcgacaccaccgaggaggcattcggcccggttacgaccctggtgaacaatgcagggattggggttatcaagagcgttgaacgcactaccacggaggaatggcgtgatgttctgtccgttaatctggatggtgtttttttcggcacccgtctgggcattcagcgcatgaaaaataaaggcttgggcgctagcatcatcaatatgagcagtattatggggatcgtaggcgctccggccgccggggcatacaacgcttccaagggggcggtacgtatcatgtcgaaaagcgcagcgctggattgcgcactgaaggactacgatgtgcgtgtcaacacagtacatccgggcgcgatcaagaccgaatcgaaggatcagctggagggttgggagcaggcaatgtcacagcgtacggcgacccctatgggccacattggcgaaccgaatgacatcgcatggatctgtgtgtacctggcatctgacgaatcgaaatttgcgacgggtgcagaatttgtggtcgacggcgggtacaccgcacag

SEQ ID NO: 388 - protein, 252 aa, Artificial Sequence
  Engineered Variant of Kred from Lactobacillus kefir
MTDRLKHKVAIITGGTMGIGLAIADKFVEEGAKVVITGRHADVGEKAAKSIGGSDVIRFVQHDASEEAGWTTVFDTTEEAFGPVTTLVNNAGIGVIKSVERTTTEEWRDVLSVNLDGVFFGTRLGIQRMKNKGLGASIINMSSIMGIVGAPAAGAYNASKGAVRIMSKSAALDCALKDYDVRVNTVHPGAIKTESKDQLEGWEQAMSQRTATPMGHIGEPNDIAWICVYLASDESKFATGAEFVVDGGYTAQ

SEQ ID NO: 389 - DNA, 756 bp, Artificial Sequence
  Engineered Variant of Kred from Lactobacillus kefir
atgaccgatcgtctgaagcacaaagtagccatcatcaccggcgggacagccggtatcggtttggcaatcgccgataaatttgtagaggagggtgcgaaagtagttattactggtcgtcacgcggatgtaggtgagaaagccgccaaatcaatcggtggcagtgatgttattcgctttgtccagcacgatgcgtccgaagaagcaggctggacgaccctgttcgacaccaccgaggaggcattcggcccggttacgaccctggtgaacaatgcagggattggggtaattaagagcgttgaacggactaccacggaggaatggcgtgatgttctgtccgttaatcaggatggtgtttttttcggcacccgtctgggcattcagcgcatgaaaaataaaggcttgggcgctagcatcatcaatatgagcagtattatggggctggtaggcgctccggccgccggggcatacaacgcttccaagggggcggtacgtatcatgtcgaaaagcgcagcgctggattgcgcactgaaggactacgatgtgcgtgtcaacacagtacatccgggcgcgatcaagaccgagtcgaaggatcagctggaaggttgggagcaggcaatgtcacagcgtacggcgacccctatgggccacattggcgaaccgaatgacatcgcatggatctgtgtgtacctggcatctgacgaatcgaaatttgcgacgggtgcagaatttgtggtcgacggcgggtacaccgcacag

SEQ ID NO: 390 - protein, 252 aa, Artificial Sequence
  Engineered Variant of Kred from Lactobacillus kefir
MTDRLKHKVAIITGGTAGIGLAIADKFVEEGAKVVITGRHADVGEKAAKSIGGSDVIRFVQHDASEEAGWTTLFDTTEEAFGPVTTLVNNAGIGVIKSVERTTTEEWRDVLSVNQDGVFFGTRLGIQRMKNKGLGASIINMSSIMGLVGAPAAGAYNASKGAVRIMSKSAALDCALKDYDVRVNTVHPGAIKTESKDQLEGWEQAMSQRTATPMGHIGEPNDIAWICVYLASDESKFATGAEFVVDGGYTAQ

SEQ ID NO: 391 - DNA, 756 bp, Artificial Sequence
  Engineered Variant of Kred from Lactobacillus kefir
atgaccgatcgtctgaagcacaaagtagccatcatcaccggcgggacagccggtatcggtttggcaatcgccgataaatttgtagaggagggtgcgaaagtagttattactggtcgtcacgcggatgtaggtgagaaagccgccaaatcaatcggtggcagtgatgttattcgctttgtccagcacgatgcgtccgaagaagcaggctggacgaccgtgttcgacaccaccgaggaggcattcggcccggttacgaccctggtgaacaatgcagggattggggtaattaagagcgttgaacggactaccacggaggaatggcgtgatgttctgtccgttaatctggatggtgtttttttcggcacccgtctgggcattcagcgcatgaaaaataaaggcttgggcgctagcatcatcaatatgagcagtattatggggctggtaggcgctccggccgccggggcatacaacgcttccaagggggcggtacgtatcatgtcgaaaagcgcagcgctggattgcgcactgaaggactacgatgtgcgtgtcaacacagtacatccgggcgcgatcaagaccgaatcgaaggatcagctgccaggttgggagcaggcaatgtcacagcgtacggcgacccctatgggccacattggcgaaccgaatgacatcgcatggatctgtgtgtacctggcatctgacgaatcgaaatttgcgacgggtgcagaatttgtggtcgacggcgggtacaccgcacag

SEQ ID NO: 392 - protein, 252 aa, Artificial Sequence
  Engineered Variant of Kred from Lactobacillus kefir
MTDRLKHKVAIITGGTAGIGLAIADKFVEEGAKVVITGRHADVGEKAAKSIGGSDVIRFVQHDASEEAGWTTVFDTTEEAFGPVTTLVNNAGIGVIKSVERTTTEEWRDVLSVNLDGVFFGTRLGIQRMKNKGLGASIINMSSIMGLVGAPAAGAYNASKGAVRIMSKSAALDCALKDYDVRVNTVHPGAIKTESKDQLPGWEQAMSQRTATPMGHIGEPNDIAWICVYLASDESKFATGAEFVVDGGYTAQ

SEQ ID NO: 393 - DNA, 756 bp, Artificial Sequence
  Engineered Variant of Kred from Lactobacillus kefir
atgaccgatcgtctgaagcacaaagtagccatcatcaccggcgggacaatgggtatcggtttggcaatcgccgataaatttgtagaggagggtgcgaaagtagttattactggtcgtcacgcggatgtaggtgagaaagccgccaaatcaatcggtggcagtgatgttattcgctttgtccagcacgatgcgtccgaagaagcaggctggacgaccctgttcgacaccaccgaggaggcattcggcccggttacgaccctggtgaacaatgcagggattggggtaattaagagcgttgaacggactaccacggaggaatggcgtgatgttctgtccgttaatctggatggtgtttttttcggcacccgtctgggcattcagcgcatgaaaaataaaggcttgggcgctagcatcatcaatatgagcagtattatggggctggtaggcgctccggccgccggggcatacaacgcttccaagggggcggtacgtatcatgtcgaaaagcgcagcgctggattgcgcactgaaggactacgatgtgcgtgtcaacacagtacatccgggcgcgatcaagaccgagtcgaaggatggcctggaaggttgggagcaggcaatgtcacagcgtacggcgacccctatgggccacattggcgaaccgaatgacatcgcatggatctgtgtgtacctggcatctgacgaatcgaaatttgcgacgggtgcagaatttgtggtcgacggcgggtacaccgcacag

SEQ ID NO: 394 - protein, 252 aa, Artificial Sequence
  Engineered Variant of Kred from Lactobacillus kefir
MTDRLKHKVAIITGGTMGIGLAIADKFVEEGAKVVITGRHADVGEKAAKSIGGSDVIRFVQHDASEEAGWTTLFDTTEEAFGPVTTLVNNAGIGVIKSVERTTTEEWRDVLSVNLDGVFFGTRLGIQRMKNKGLGASIINMSSIMGLVGAPAAGAYNASKGAVRIMSKSAALDCALKDYDVRVNTVHPGAIKTESKDGLEGWEQAMSQRTATPMGHIGEPNDIAWICVYLASDESKFATGAEFVVDGGYTAQ

SEQ ID NO: 395 - DNA, 756 bp, Artificial Sequence
  Engineered Variant of Kred from Lactobacillus kefir
atgaccgatcgtctgaagcacaaagtagccatcatcaccggcgggacaatgggtatcggtttggcaatcgccgataaatttgtagaggagggtgcgaaagtagttattactggtcgtcacgcggatgtaggtgagaaagccgccaaatcaatcggtggcagtgatgttattcgctttgtccagcacgatgcgtccgaagaagcaggctggacgaccctgttcgacaccaccgaggaggcattcggcccggttacgaccctggtgaacaatgcagggattggggtaattaagagcgttgaacggactaccacggaggaatggcgtgatgttctgtccgttaatctggatggtgtttttttcggcacccgtctgggcattcagcgcatgaaaaataaaggcttgggcgctagcatcatcaatatgagcagtattatggggctggtaggcgctccggccgccggggcatacaacgcttccaagggggcggtacgtatcatgtcgaaaagcgcagcgctggattgcgcactgaaggactacgatgtgcgtgtcaacacagtacatccgggcgcgatcaagaccgagtcgaaggatcgcctggaaggttgggagcaggcaatgtcacagcgtacggcgacccctatgggccacattggcgaaccgaatgacatcgcatggatctgtgtgtacctggcatctgacgaatcgaaatttgcgacgggtgcagaatttgtggtcgacggcgggtacaccgcacag

SEQ ID NO: 396 - protein, 252 aa, Artificial Sequence
  Engineered Variant of Kred from Lactobacillus kefir
MTDRLKHKVAIITGGTMGIGLAIADKFVEEGAKVVITGRHADVGEKAAKSIGGSDVIRFVQHDASEEAGWTTLFDTTEEAFGPVTTLVNNAGIGVIKSVERTTTEEWRDVLSVNLDGVFFGTRLGIQRMKNKGLGASIINMSSIMGLVGAPAAGAYNASKGAVRIMSKSAALDCALKDYDVRVNTVHPGAIKTESKDRLEGWEQAMSQRTATPMGHIGEPNDIAWICVYLASDESKFATGAEFVVDGGYTAQ

SEQ ID NO: 397 - DNA, 756 bp, Artificial Sequence
  Engineered Variant of Kred from Lactobacillus kefir
atgaccgatcgtctgaagcacaaagtagccatcatcaccggcgggacaatgggtatcggtttggcaatcgccgataaatttgtagaggagggtgcgaaagtagttattactggtcgtcacgcggatgtaggtgagaaagccgccaaatcaatcggtggcagtgatgttattcgctttgtccagcacgatgcgtccgaagaacgtggctggacggacctgttcgacaccaccgaggaggcattcggcccggttacgaccctggtgaacaatgcagggattggggtaattaagagcgttgaacaaactactacggaggaatggcgtgatgttctgtccgttaatctggatggtgtttttttcggcacccgtctgggcattcagcgcatgaaaaataaaggcttgggcgctagcatcatcaatatgagcagtattatggggctggtaggcgctccgcaggccggggcatacaacgcttccaagggggcggtacgtatcatgtcgaaaagcgcagcgctggattgcgcactgaaggactacgatgtgcgtgtcaacacagtacatccgggcgcgatcaagaccgagtcgaaggatcagctggaaggttgggagcagctgatgtcacagcgtacggcgacccctatgggccacattggcgaaccgaatgacatcgcatggatctgtgtgtacctggcatctgacgaatcgaaatttgcgacgggtgcagaatttgtggtcgacggcgggtacaccgcacag

SEQ ID NO: 398 - protein, 252 aa, Artificial Sequence
  Engineered Variant of Kred from Lactobacillus kefir
MTDRLKHKVAIITGGTMGIGLAIADKFVEEGAKVVITGRHADVGEKAAKSIGGSDVIRFVQHDASEERGWTDLFDTTEEAFGPVTTLVNNAGIGVIKSVEQTTTEEWRDVLSVNLDGVFFGTRLGIQRMKNKGLGASIINMSSIMGLVGAPQAGAYNASKGAVRIMSKSAALDCALKDYDVRVNTVHPGAIKTESKDQLEGWEQLMSQRTATPMGHIGEPNDIAWICVYLASDESKFATGAEFVVDGGYTAQ

SEQ ID NO: 399 - DNA, 756 bp, Artificial Sequence
  Engineered Variant of Kred from Lactobacillus kefir
atgaccgatcgtctgaagcacaaagtagccatcatcaccggcgggacaatgggtatcggtttggcaatcgccgataaatttgtagaggagggtgcgaaagtagttattactggtcgtcacgcggatgtaggtgagaaagccgccaaatcaatcggtggcagtgatgttattcgctttgtccagcacgatgcgtccgaagaagagggctggacggacctgttcgacaccaccgaggaggcattcggcccggttacgaccctggtgaacaatgcagggattggggtaattaagagcgttgaaaagactactacggaggaatggcgtgatgttctgtccgttaatctggatggtgtttttttcggcacccgtctgggcattcagcgcatgaaaaataaaggcttgggcgctagcatcatcaatatgagcagtattatggggctggtaggcgctccgcaggccggggcatacaacgcttccaagggggcggtacgtatcatgtcgaaaagcgcagcgctggattgcgcactgaaggactacgatgtgcgtgtcaacacagtacatccgggcgcgatcaagaccgagtcgaaggatcagctggaaggttgggagcagctgatgtcacagcgtacggcgacccctatgggccacattggcgaaccgaatgacatcgcatggatctgtgtgtacctggcatctgacgaatcgaaatttgcgacgggtgcagaatttgtggtcgacggcgggtacaccgcacag

SEQ ID NO: 400 - protein, 252 aa, Artificial Sequence
  Engineered Variant of Kred from Lactobacillus kefir
MTDRLKHKVAIITGGTMGIGLAIADKFVEEGAKVVITGRHADVGEKAAKSIGGSDVIRFVQHDASEEEGWTDLFDTTEEAFGPVTTLVNNAGIGVIKSVEKTTTEEWRDVLSVNLDGVFFGTRLGIQRMKNKGLGASIINMSSIMGLVGAPQAGAYNASKGAVRIMSKSAALDCALKDYDVRVNTVHPGAIKTESKDQLEGWEQLMSQRTATPMGHIGEPNDIAWICVYLASDESKFATGAEFVVDGGYTAQ

SEQ ID NO: 401 - DNA, 756 bp, Artificial Sequence
  Engineered Variant of Kred from Lactobacillus kefir
atgaccgatcgtctgaagcacaaagtagccatcatcaccggcgggacaatgggtatcggtttggcaatcgccgataaatttgtagaggagggtgcgaaagtagttattactggtcgtcacgcggatgtaggtgagaaagccgccaaatcaatcggtggcagtgatgttattcgctttgtccagcacgatgcgtccgaagaagcgggctggacgacgctgttcgacaccaccgaggaggcattcggcccggttacgaccctggtgaacaatgcagggattggggtaattaagagcgttgaaatgactactacggaggaatggcgtgatgttctgtccgttaatctggatggtgtttttttcggcacccgtctgggcattcagcgcatgaaaaataaaggcttgggcgctagcatcatcaatatgagcagtattatggggctggtaggcgctccggccgccggggcatacaacgcttccaagggggcggtacgtatcatgtcgaaaagcgcagcgctggattgcgcactgaaggactacgatgtgcgtgtcaacacagtacatccgggcgcgatcaagaccgagtcgaaggatcagctggaaggttgggagcagctgatgtcacagcgtacggcgacccctatgggccacattggcgaaccgaatgacatcgcatggatctgtgtgtacctggcatctgacgaatcgaaatttgcgacgggtgcagaatttgtggtcgacggcgggtacaccgcacag

SEQ ID NO: 402 - protein, 252 aa, Artificial Sequence
  Engineered Variant of Kred from Lactobacillus kefir
MTDRLKHKVAIITGGTMGIGLAIADKFVEEGAKVVITGRHADVGEKAAKSIGGSDVIRFVQHDASEEAGWTTLFDTTEEAFGPVTTLVNNAGIGVIKSVEMTTTEEWRDVLSVNLDGVFFGTRLGIQRMKNKGLGASIINMSSIMGLVGAPAAGAYNASKGAVRIMSKSAALDCALKDYDVRVNTVHPGAIKTESKDQLEGWEQLMSQRTATPMGHIGEPNDIAWICVYLASDESKFATGAEFVVDGGYTAQ

SEQ ID NO: 403 - DNA, 756 bp, Artificial Sequence
  Engineered Variant of Kred from Lactobacillus kefir
atgaccgatcgtctgaagcacaaagtagccatcatcaccggcgggacaatgggtatcggtttggcaatcgccgataaatttgtagaggagggtgcgaaagtagttattactggtcgtcacgcggatgtaggtgagaaagccgccaaatcaatcggtggcagtgatgttattcgctttgtccagcacgatgcgtccgaagaacgtggctggacgcgcctgttcgacaccaccgaggaggcattcggcccggttacgaccctggtgaacaatgcagggattggggtaattaagagcgttgaacggactaccacggaggaatggcgtgatgttctgtccgttaatctggatggtgtttttttcggcacccgtgagggcattcagcgcatgaaaaataaaggcttgggcgctagcatcatcaatatgagcagtattatggggctggtaggcgctccggccgccggggcatacaacgcttccaagggggcggtacgtatcatgtcgaaaagcgcagcgctggattgcgcactgaaggactacgatgtgcgtgtcaacacagtacatccgggcgcgatcaagaccgagtcgaaggatcagctggaaggttgggagcaggcaatgtcacagcgtacggcgacccctatgggccacattggcgaaccgaatgacatcgcatggatctgtgtgtacctggcatctgacgaatcgaaatttgcgacgggtgcagaatttgtggtcgacggcgggtacaccgcacag

SEQ ID NO: 404 - protein, 252 aa, Artificial Sequence
  Engineered Variant of Kred from Lactobacillus kefir
MTDRLKHKVAIITGGTMGIGLAIADKFVEEGAKVVITGRHADVGEKAAKSIGGSDVIRFVQHDASEERGWTRLFDTTEEAFGPVTTLVNNAGIGVIKSVERTTTEEWRDVLSVNLDGVFFGTREGIQRMKNKGLGASIINMSSIMGLVGAPAAGAYNASKGAVRIMSKSAALDCALKDYDVRVNTVHPGAIKTESKDQLEGWEQAMSQRTATPMGHIGEPNDIAWICVYLASDESKFATGAEFVVDGGYTAQ

SEQ ID NO: 405 - DNA, 756 bp, Artificial Sequence
  Engineered Variant of Kred from Lactobacillus kefir
atgaccgatcgtctgaagcacaaagtagccatcatcaccggcgggacaatgggtatcggtttggcaatcgccgataaatttgtagaggagggtgcgaaagtagttattactggtcgtcacgcggatgtaggtgagaaagccgccaaatcaatcggtggcagtgatgttattcgctttgtccagcacgatgcgtccgaagaacgtggctggacgcgcctgttcgacaccaccgaggaggcattcggcccggttacgaccctggtgaacaatgcagggattggggtaattaagagcgttgaacgcactactacggaggaatggcgtgatgttctgtccgttaatctggatggtgtttttttcggcacccgtgagggcattcagcgcatgaaaaataaaggcttgggcgctagcatcatcaatatgagcagtattatggggctggtaggcgctccgcaggccggggcatacaacgcttccaagggggcggtacgtatcatgtcgaaaagcgcagcgctggattgcgcactgaaggactacgatgtgcgtgtcaacacagtacatccgggcgcgatcaagaccgagtcgaaggatcagctggaaggttgggagcaggcaatgtcacagcgtacggcgacccctatgggccacattggcgaaccgaatgacatcgcatggatctgtgtgtacctggcatctgacgaatcgaaatttgcgacgggtgcagaatttgtggtcgacggcgggtacaccgcacag

SEQ ID NO: 406 - protein, 252 aa, Artificial Sequence
  Engineered Variant of Kred from Lactobacillus kefir
MTDRLKHKVAIITGGTMGIGLAIADKFVEEGAKVVITGRHADVGEKAAKSIGGSDVIRFVQHDASEERGWTRLFDTTEEAFGPVTTLVNNAGIGVIKSVERTTTEEWRDVLSVNLDGVFFGTREGIQRMKNKGLGASIINMSSIMGLVGAPQAGAYNASKGAVRIMSKSAALDCALKDYDVRVNTVHPGAIKTESKDQLEGWEQAMSQRTATPMGHIGEPNDIAWICVYLASDESKFATGAEFVVDGGYTAQ

SEQ ID NO: 407 - DNA, 756 bp, Artificial Sequence
  Engineered Variant of Kred from Lactobacillus kefir
atgaccgatcgtctgaagcacaaagtagccatcatcaccggcgggacaatgggtatcggtttggcaatcgccgataaatttgtagaggagggtgcgaaagtagttattactggtcgtcacgcggatgtaggtgagaaagccgccaaatcaatcggtggcagtgatgttattcgctttgtccagcacgatgcgtccgaagaagcgggctggacggacctgttcgacaccaccgaggaggcattcggcccggttacgaccctggtgaacaatgcagggattggggtaattaagagcgttgaacggactaccacggaggaatggcgtgatgttctgtccgttaatctggatggtgtttttttcggcacccgtctgggcattcagcgcatgaaaaataaaggcttgggcgctagcatcatcaatatgagcagtattatggggctggtaggcgctccgcaggccggggcatacaacgcttccaagggggcggtacgtatcatgtcgaaaagcgcagcgctggattgcgcactgaaggactacgatgtgcgtgtcaacacagtacatccgggcgcgatcaagaccgagtcgaaggatcagctggaaggttgggagcaggcaatgtcacagcgtacggcgacccctatgggccacattggcgaaccgaatgacatcgcatggatctgtgtgtacctggcatctgacgaatcgaaatttgcgacgggtgcagaatttgtggtcgacggcgggtacaccgcacag

SEQ ID NO: 408 - protein, 252 aa, Artificial Sequence
  Engineered Variant of Kred from Lactobacillus kefir
MTDRLKHKVAIITGGTMGIGLAIADKFVEEGAKVVITGRHADVGEKAAKSIGGSDVIRFVQHDASEEAGWTDLFDTTEEAFGPVTTLVNNAGIGVIKSVERTTTEEWRDVLSVNLDGVFFGTRLGIQRMKNKGLGASIINMSSIMGLVGAPQAGAYNASKGAVRIMSKSAALDCALKDYDVRVNTVHPGAIKTESKDQLEGWEQAMSQRTATPMGHIGEPNDIAWICVYLASDESKFATGAEFVVDGGYTAQ

SEQ ID NO: 409 - DNA, 756 bp, Artificial Sequence
  Engineered Variant of Kred from Lactobacillus kefir
atgaccgatcgtctgaagcacaaagtagccatcatcaccggcgggacaatgggtatcggtttggcaatcgccgataaatttgtagaggagggtgcgaaagtagttattactggtcgtcacgcggatgtaggtgagaaagccgccaaatcaatcggtggcagtgatgttattcgctttgtccagcacgatgcgtccgaagaacgtggctggacgacgctgttcgacaccaccgaggaggcattcggcccggttacgaccctggtgaacaatgcagggattggggtaattaagagcgttgaacggactaccacggaggaatggcgtgatgttctgtccgttaatctggatggtgtttttttcggcacccgtgagggcattcagcgcatgaaaaataaaggcttgggcgctagcatcatcaatatgagcagtattatggggctggtaggcgctccggccgccggggcatacaacgcttccaagggggcggtacgtatcatgtcgaaaagcgcagcgctggattgcgcactgaaggactacgatgtgcgtgtcaacacagtacatccgggcgcgatcaagaccgagtcgaaggatcagctggaaggttgggagcagctgatgtcacagcgtacggcgacccctatgggccacattggcgaaccgaatgacatcgcatggatctgtgtgtacctggcatctgacgaatcgaaatttgcgacgggtgcagaatttgtggtcgacggcgggtacaccgcacag

SEQ ID NO: 410 - protein, 252 aa, Artificial Sequence
  Engineered Variant of Kred from Lactobacillus kefir
MTDRLKHKVAIITGGTMGIGLAIADKFVEEGAKVVITGRHADVGEKAAKSIGGSDVIRFVQHDASEERGWTTLFDTTEEAFGPVTTLVNNAGIGVIKSVERTTTEEWRDVLSVNLDGVFFGTREGIQRMKNKGLGASIINMSSIMGLVGAPAAGAYNASKGAVRIMSKSAALDCALKDYDVRVNTVHPGAIKTESKDQLEGWEQLMSQRTATPMGHIGEPNDIAWICVYLASDESKFATGAEFVVDGGYTAQ

SEQ ID NO: 411 - DNA, 756 bp, Artificial Sequence
  Engineered Variant of Kred from Lactobacillus kefir
atgaccgatcgtctgaagcacaaagtagccatcatcaccggcgggacaatgggtatcggtttggcaatcgccgataaatttgtagaggagggtgcgaaagtagttattactggtcgtcacgcggatgtaggtgagaaagccgccaaatcaatcggtggcagtgatgttattcgctttgtccagcacgatgcgtccgaagaacgtggctggacgacgctgttcgacaccaccgaggaggcattcggcccggttacgaccctggtgaacaatgcagggattggggtaattaagagcgttgaacaaactactacggaggaatggcgtgatgttctgtccgttaatctggatggtgtttttttcggcacccgtgagggcattcagcgcatgaaaaataaaggcttgggcgctagcatcatcaatatgagcagtattatggggctggtaggcgctccgcaggccggggcatacaacgcttccaagggggcggtacgtatcatgtcgaaaagcgcagcgctggattgcgcactgaaggactacgatgtgcgtgtcaacacagtacatccgggcgcgatcaagaccgagtcgaaggatcagctggaaggttgggagcagctgatgtcacagcgtacggcgacccctatgggccacattggcgaaccgaatgacatcgcatggatctgtgtgtacctggcatctgacgaatcgaaatttgcgacgggtgcagaatttgtggtcgacggcgggtacaccgcacag

SEQ ID NO: 412 - protein, 252 aa, Artificial Sequence
  Engineered Variant of Kred from Lactobacillus kefir
MTDRLKHKVAIITGGTMGIGLAIADKFVEEGAKVVITGRHADVGEKAAKSIGGSDVIRFVQHDASEERGWTTLFDTTEEAFGPVTTLVNNAGIGVIKSVEQTTTEEWRDVLSVNLDGVFFGTREGIQRMKNKGLGASIINMSSIMGLVGAPQAGAYNASKGAVRIMSKSAALDCALKDYDVRVNTVHPGAIKTESKDQLEGWEQLMSQRTATPMGHIGEPNDIAWICVYLASDESKFATGAEFVVDGGYTAQ

SEQ ID NO: 413 - DNA, 4205 bp, Artificial Sequence
  pJVFabI#2-Bla plasmid sequence
aacggctttgccgcggccctctcacttccctgttaagtatcttcctggcatcttccaggaaatctccgccccgttcgtaagccatttccgctcgccgcagtcgaacgaccgagcgtagcgagtcagtgagcgaggaagcggaatatatcctgtatcacatattctgctgacgcaccggtgcagccttttttctcctgccacatgaagcacttcactgacaccctcatcagtgaaccaccgctggtagcggtggtttttttaggcctatggccttttttttttgtgggaaacctttcgcggtatggtattaaagcgcccggaagagagtcaattcagggtggtgaatgtgaaaccagtaacgttatacgatgtcgcagagtatgccggtgtctcttatcagaccgtttcccgcgtggtgaaccaggccagccacgtttctgcgaaaacgcgggaaaaagtggaagcggcgatggcggagctgaattacattcccaaccgcgtggcacaacaactggcgggcaaacagtcgttgctgattggcgttgccacctccagtctggccctgcacgcgccgtcgcaaattgtcgcggcgattaaatctcgcgccgatcaactgggtgccagcgtggtggtgtcgatggtagaacgaagcggcgtcgaagcctgtaaagcggcggtgcacaatcttctcgcgcaacgcgtcagtgggctgatcattaactatccgctggatgaccaggatgccattgctgtggaagctgcctgcactaatgttccggcgttatttcttgatgtctctgaccagacacccatcaacagtattattttctcccatgaagacggtacgcgactgggcgtggagcatctggtcgcattgggtcaccagcaaatcgcgctgttagcgggcccattaagttctgtctcggcgcgtctgcgtctggctggctggcataaatatctcactcgcaatcaaattcagccgatagcggaacgggaaggcgactggagtgccatgtccggttttcaacaaaccatgcaaatgctgaatgagggcatcgtttccactgcgatgctggttgccaacgatcagatggcgctgggcgcaatgcgcgccattaccgagtccgggctgcgcgttggtgcggacatctcggtagtgggatacgacgataccgaagacagctcatgttatatcccgccgttaaccaccatcaaacaggattttcgcctgctggggcaaaccagcgtggaccgcttgctgcaactctctcagggccaggcggttaagggcaatcagctgttgcccgtctcactggtgaaaagaaaaaccaccctggcgcccaatacgcaaaccgcctctccccgcgcgttggccgattcattaatgcagctggcacgacaggtttcccgactggaaagcgggcagtgagcggtacccgataaaagcggcttcctgacaggaggccgttttgtttctcgagttaattaaggcagtgagcgcaacgcaattaatgtgagttagctcactcattaggcaccccaggctttacactttatgcttccggctcgtatgttgtgtggaattgtgagcggataacaatttcacacaggaaacggctatgaccatgattacggattcactggccgtcgttttacaatctagaggccagcctggccataaggagatatacatatgagtattcaacatttccgtgtcgcccttattcccttttctgcggcattttgccttcctgtttttgctcacccagaaacgctggtgaaagtaaaagatgctgaagatcagttgggtgcacgagtgggttacatcgaactggatctcaacagcggtaagatccttgagagttttcgccccgaagagcgttttccaatgatgagcacttttaaagttctgctatgtggcgcggtattatcccgtgttgacgccgggcaagagcaactcggtcgccgcatacactattctcagaatgacttggttgagtactcaccagtcacagaaaagcatcttacggatggcatgacagtaagagaattatgcagtgctgccataaccatgagtgataacactgcggccaacttacttctgacaacgatcggaggaccgaaggagctaaccgtttttttgcacaccatgggggatcatgtaactcgccttgatcgttgggaaccggagctgaatgaagccataccaaacgacgagcgtgacaccacgatgcctacagcaatggcaacaacgttgcgcaaactattaactggcgaactacttactctagcttcccggcaacaattaatagactggatggaggcggataaagttgcaggaccacttctgcgctcggcccttccggctggctggtttattgctgataaatctggagccggtgagcgtgggtctcgcggtatcattgcagcactggggccagatggtaagccctcccgtatcgtagttatctacacgacggggagtcaggcaactatggatgaacgtaatagacagatcgctgagataggtgcctcactgattaagcattggggccaaactggccaccatcaccatcaccattagggaagagcagatgggcaagcttgacctgtgaagtgaaaaatggcgcacattgtgcgacatttttttttgaattctacgtaaaaagcagccgatacatcggctgctttttttttctgcagggtgaaacaaaacggttgaccacatgaagtaaacacggtacggtgcggtagtttatcacagttaaattgctaacgcagtcaggcaaagtccatgggttttctttccggtaagcgcattctggtaaccggtgttgccagcaaactatccatcgcctacggtatcgctcaggcgatgcaccgcgaaggagctgaactggcattcacctaccagaacgacaaactgaaaggccgcgtagaagaatttgccgctcaattgggttctgacatcgttctgcagtgcgatgttgcagaagatgccagcatcgacaccatgttcgctgaactggggaaagtttggccgaaatttgacggttttgtacactctattgtttttgcacctggcgatcagctggatggtgactatgttaacgccgttacccgtgaaggcttcaaaattgcccacgacatcagctcctacagcttcgttgcaatggcaaaagcttgccgctccatgctgaatccgggttctgccctgctgaccctttcctaccttggcgctgagcgcgctatcccgaactacaacgttatgggtctggcaaaagcgtctctggaagcgaacgtgcgctatatggcgaacgcgatgggtccggaaggtgtgcgtgttaacgccatctctgctggtccgatccgtactctggcggcctccggtatcaaagacttccgcaaaatgctggctcattgcgaagccgttaccccgattcgccgtaccgttactattgaagatgtgggtaactctgcggcattcctgtgctccgatctctctgccggtatctccggtgaagtggtccacgttgacggcggtttcagcattgctgcaatgaacgaactcgaactgaaataactgcaggagctcaaacagcagcctgtattcaggctgctttttagaaatattttatctgattaataagatgatcttcttgagatcgttttggtctgcgcgtattctcttgctctgaaaacgaaaaaaccgccttgcagggcggtttttcgaaggttctctgagctaccaactctttgaaccgaggtaactggcttggaggagcgcagtcaccaaaacttgtcctttcagtttagccttaaccggcgcatgacttcaagactaactcctctaaatcaattaccagtggctgctgccagtggtgcttttgcatgtctttccgggttggactcaagacgatagttaccggataaggcgcagcggtcggactgaacggggggttcgtgcatacagtccagcttggagcgaactgcctacccggaactgagtgtcaggcgtggaatgagacaaacgcggccataacagcggaatgacaccggtaaaccgaaaggcaggaacaggagagcgcacgagggagccgccagggggaaacgcctggtatctttatagtcctgtcgggtttcgccaccactgatttgagcgtcagatttcgtgatgcttgtcaggggggcggagcctatggaaa

SEQ ID NO: 414 - DNA, 4205 bp, Artificial Sequence
  pJVFabI#5-Bla plasmid sequence
aacggctttgccgcggccctctcacttccctgttaagtatcttcctggcatcttccaggaaatctccgccccgttcgtaagccatttccgctcgccgcagtcgaacgaccgagcgtagcgagtcagtgagcgaggaagcggaatatatcctgtatcacatattctgctgacgcaccggtgcagccttttttctcctgccacatgaagcacttcactgacaccctcatcagtgaaccaccgctggtagcggtggtttttttaggcctatggccttttttttttgtgggaaacctttcgcggtatggtattaaagcgcccggaagagagtcaattcagggtggtgaatgtgaaaccagtaacgttatacgatgtcgcagagtatgccggtgtctcttatcagaccgtttcccgcgtggtgaaccaggccagccacgtttctgcgaaaacgcgggaaaaagtggaagcggcgatggcggagctgaattacattcccaaccgcgtggcacaacaactggcgggcaaacagtcgttgctgattggcgttgccacctccagtctggccctgcacgcgccgtcgcaaattgtcgcggcgattaaatctcgcgccgatcaactgggtgccagcgtggtggtgtcgatggtagaacgaagcggcgtcgaagcctgtaaagcggcggtgcacaatcttctcgcgcaacgcgtcagtgggctgatcattaactatccgctggatgaccaggatgccattgctgtggaagctgcctgcactaatgttccggcgttatttcttgatgtctctgaccagacacccatcaacagtattattttctcccatgaagacggtacgcgactgggcgtggagcatctggtcgcattgggtcaccagcaaatcgcgctgttagcgggcccattaagttctgtctcggcgcgtctgcgtctggctggctggcataaatatctcactcgcaatcaaattcagccgatagcggaacgggaaggcgactggagtgccatgtccggttttcaacaaaccatgcaaatgctgaatgagggcatcgtttccactgcgatgctggttgccaacgatcagatggcgctgggcgcaatgcgcgccattaccgagtccgggctgcgcgttggtgcggacatctcggtagtgggatacgacgataccgaagacagctcatgttatatcccgccgttaaccaccatcaaacaggattttcgcctgctggggcaaaccagcgtggaccgcttgctgcaactctctcagggccaggcggttaagggcaatcagctgttgcccgtctcactggtgaaaagaaaaaccaccctggcgcccaatacgcaaaccgcctctccccgcgcgttggccgattcattaatgcagctggcacgacaggtttcccgactggaaagcgggcagtgagcggtacccgataaaagcggcttcctgacaggaggccgttttgtttctcgagttaattaaggcagtgagcgcaacgcaattaatgtgagttagctcactcattaggcaccccaggctttacactttatgcttccggctcgtatgttgtgtggaattgtgagcggataacaatttcacacaggaaacggctatgaccatgattacggattcactggccgtcgttttacaatctagaggccagcctggccataaggagatatacatatgagtattcaacatttccgtgtcgcccttattcccttttctgcggcattttgccttcctgtttttgctcacccagaaacgctggtgaaagtaaaagatgctgaagatcagttgggtgcacgagtgggttacatcgaactggatctcaacagcggtaagatccttgagagttttcgccccgaagagcgttttccaatgatgagcacttttaaagttctgctatgtggcgcggtattatcccgtgttgacgccgggcaagagcaactcggtcgccgcatacactattctcagaatgacttggttgagtactcaccagtcacagaaaagcatcttacggatggcatgacagtaagagaattatgcagtgctgccataaccatgagtgataacactgcggccaacttacttctgacaacgatcggaggaccgaaggagctaaccgtttttttgcacaccatgggggatcatgtaactcgccttgatcgttgggaaccggagctgaatgaagccataccaaacgacgagcgtgacaccacgatgcctacagcaatggcaacaacgttgcgcaaactattaactggcgaactacttactctagcttcccggcaacaattaatagactggatggaggcggataaagttgcaggaccacttctgcgctcggcccttccggctggctggtttattgctgataaatctggagccggtgagcgtgggtctcgcggtatcattgcagcactggggccagatggtaagccctcccgtatcgtagttatctacacgacggggagtcaggcaactatggatgaacgtaatagacagatcgctgagataggtgcctcactgattaagcattggggccaaactggccaccatcaccatcaccattagggaagagcagatgggcaagcttgacctgtgaagtgaaaaatggcgcacattgtgcgacatttttttttgaattctacgtaaaaagcagccgatacatcggctgctttttttttctgcagggtgaaacaaaacggttgactacatgaagtaaacacggtacggtgcggtagtttatcacagttaaattgctaacgcagtcaggcaaagtccatgggttttctttccggtaagcgcattctggtaaccggtgttgccagcaaactatccatcgcctacggtatcgctcaggcgatgcaccgcgaaggagctgaactggcattcacctaccagaacgacaaactgaaaggccgcgtagaagaatttgccgctcaattgggttctgacatcgttctgcagtgcgatgttgcagaagatgccagcatcgacaccatgttcgctgaactggggaaagtttggccgaaatttgacggttttgtacactctattgtttttgcacctggcgatcagctggatggtgactatgttaacgccgttacccgtgaaggcttcaaaattgcccacgacatcagctcctacagcttcgttgcaatggcaaaagcttgccgctccatgctgaatccgggttctgccctgctgaccctttcctaccttggcgctgagcgcgctatcccgaactacaacgttatgggtctggcaaaagcgtctctggaagcgaacgtgcgctatatggcgaacgcgatgggtccggaaggtgtgcgtgttaacgccatctctgctggtccgatccgtactctggcggcctccggtatcaaagacttccgcaaaatgctggctcattgcgaagccgttaccccgattcgccgtaccgttactattgaagatgtgggtaactctgcggcattcctgtgctccgatctctctgccggtatctccggtgaagtggtccacgttgacggcggtttcagcattgctgcaatgaacgaactcgaactgaaataactgcaggagctcaaacagcagcctgtattcaggctgctttttagaaatattttatctgattaataagatgatcttcttgagatcgttttggtctgcgcgtaatctcttgctctgaaaacgaaaaaaccgccttgcagggcggtttttcgaaggttctctgagctaccaactctttgaaccgaggtaactggcttggaggagcgcagtcaccaaaacttgtcctttcagtttagccttaaccggcgcatgacttcaagactaactcctctaaatcaattaccagtggctgctgccagtggtgcttttgcatgtctttccgggttggactcaagacgatagttaccggataaggcgcagcggtcggactgaacggggggttcgtgcatacagtccagcttggagcgaactgcctacccggaactgagtgtcaggcgtggaatgagacaaacgcggccataacagcggaatgacaccggtaaaccgaaaggcaggaacaggagagcgcacgagggagccgccagggggaaacgcctggtatctttatagtcctgtcgggtttcgccaccactgatttgagcgtcagatttcgtgatgcttgtcaggggggcggagcctatggaaa
